United States Patent Application Publication US 2023/0272435 A1 - sequence listing, part 9

SEQ ID NO: 49493 - DNA, 50 bp, synthetic construct
  source 1..50: mol_type = other DNA
tccacacttgttatttttcttttgaaccgaagaaaatatggctctgttgg

SEQ ID NO: 49494 - DNA, 50 bp, synthetic construct
  source 1..50: mol_type = other DNA
tttagttcttccataaccaataaacctttaaaggaaatggaagaactaaa

SEQ ID NO: 49495 - DNA, 50 bp, synthetic construct
  source 1..50: mol_type = other DNA
gggcgaaagccctttttttatacctgttgatcaaattcgatgccttaata

SEQ ID NO: 49496 - DNA, 50 bp, synthetic construct
  source 1..50: mol_type = other DNA
tgtaactgtatgcgttcatttctcaagtgtagattagacataggattaca

SEQ ID NO: 49497 - DNA, 50 bp, synthetic construct
  source 1..50: mol_type = other DNA
caaaaagatagatgctttggaggaacatttcaaatgctcacattcttttg

SEQ ID NO: 49498 - DNA, 50 bp, synthetic construct
  source 1..50: mol_type = other DNA
tattctttaaaaatattgacgatgagcttgagaaatatttttaaattcaa

SEQ ID NO: 49499 - DNA, 50 bp, synthetic construct
  source 1..50: mol_type = other DNA
ataaatccctatctgaccgctcctaaagaagcgttcacttagggattgaa

SEQ ID NO: 49500 - DNA, 50 bp, synthetic construct
  source 1..50: mol_type = other DNA
aacttatcaagaattaatgttatcggaataaccctgcttcatgatttgtc

SEQ ID NO: 49501 - DNA, 50 bp, synthetic construct
  source 1..50: mol_type = other DNA
atatcactctgaaggatgtaattatctatttacatatggtagacttacat

SEQ ID NO: 49502 - DNA, 50 bp, synthetic construct
  source 1..50: mol_type = other DNA
tcaaatcaggcgtttacgcgatcgattattgggctaaaagcttgataaac

SEQ ID NO: 49503 - DNA, 50 bp, synthetic construct
  source 1..50: mol_type = other DNA
ctcgtcctccttgaccggtcggaacgtccgtggatttttggtcggacgtt

SEQ ID NO: 49504 - DNA, 50 bp, synthetic construct
  source 1..50: mol_type = other DNA
gcaccagcattattaagcactttcgagaaagggcttgttaaagctggtga

SEQ ID NO: 49505 - DNA, 50 bp, synthetic construct
  source 1..50: mol_type = other DNA
ttgaagggataatgtaatatgtttgtacacatattccattgaccccacaa

SEQ ID NO: 49506 - DNA, 50 bp, synthetic construct
  source 1..50: mol_type = other DNA
atctatatatttctatgcaatcactagtgtttgcaaataaatatagaatt

SEQ ID NO: 49507 - DNA, 50 bp, synthetic construct
  source 1..50: mol_type = other DNA
tgttggataatgtcattcttggtatttaccaaaaataatgaggtgaaaca

SEQ ID NO: 49508 - DNA, 50 bp, synthetic construct
  source 1..50: mol_type = other DNA
caacattgctctttattttcaaaaaggtttgataagtcgtaccaagctta

SEQ ID NO: 49509 - DNA, 50 bp, synthetic construct
  source 1..50: mol_type = other DNA
ctcggccacctgtccgctatctgctcgtcatgggcgaagaggttgccgag

SEQ ID NO: 49510 - DNA, 50 bp, synthetic construct
  source 1..50: mol_type = other DNA
ttttgaaattacctttgtggaaacatatttgcacgaaaatatagttatcg

SEQ ID NO: 49511 - DNA, 50 bp, synthetic construct
  source 1..50: mol_type = other DNA
ttttagttattttgggttgactacatatcatgtacccacaataacacgag

SEQ ID NO: 49512 - DNA, 50 bp, synthetic construct
  source 1..50: mol_type = other DNA
agccttgcagcacaaggcatctgacgtcatagggcttctattttcagata

SEQ ID NO: 49513 - DNA, 50 bp, synthetic construct
  source 1..50: mol_type = other DNA
gggcgatccttctacgccatcactaagaaggaggcgcataccgatggcaa

SEQ ID NO: 49514 - DNA, 50 bp, synthetic construct
  source 1..50: mol_type = other DNA
gctatcctcaatactctccatgctgtaatcctgatcgtattgcggatatt

SEQ ID NO: 49515 - DNA, 50 bp, synthetic construct
  source 1..50: mol_type = other DNA
gagttgaaatatgacctcatcgtcggatggaagttctagggcctcatttc

SEQ ID NO: 49516 - DNA, 50 bp, synthetic construct
  source 1..50: mol_type = other DNA
tagaagcccgatgacggggcgatatttcctcctccgtcaagtgcctcgta

SEQ ID NO: 49517 - DNA, 50 bp, synthetic construct
  source 1..50: mol_type = other DNA
cccaacttgcccgaaatgcatgattcactatggattttgtttttgtttag

SEQ ID NO: 49518 - DNA, 50 bp, synthetic construct
  source 1..50: mol_type = other DNA
taaaagtccgatgacgggacgatatttcctcctccgtcaagtgcctcgta

SEQ ID NO: 49519 - DNA, 50 bp, synthetic construct
  source 1..50: mol_type = other DNA
aatttgtttgtaaaatccgctcactagtgaatgcttagtacaaacaaatg

SEQ ID NO: 49520 - DNA, 50 bp, synthetic construct
  source 1..50: mol_type = other DNA
tttcctatgaccttgctttcattgatccttgaaatcaaggctttttacta

SEQ ID NO: 49521 - DNA, 50 bp, synthetic construct
  source 1..50: mol_type = other DNA
aacccttgacatcaatactaccgtcttcaatatgtttcgagatgagggga

SEQ ID NO: 49522 - DNA, 50 bp, synthetic construct
  source 1..50: mol_type = other DNA
tcatcacaatgatcaagctgtaatggctttagagtgatatatagtagcga

SEQ ID NO: 49523 - DNA, 50 bp, synthetic construct
  source 1..50: mol_type = other DNA
tttttttggtgtttctgtgttataatatcttcaatcttacaatcaagtgt

SEQ ID NO: 49524 - DNA, 50 bp, synthetic construct
  source 1..50: mol_type = other DNA
tatattcaggtggtgtagcgcttcacgtttaaatacaccatctaaagcga

SEQ ID NO: 49525 - DNA, 50 bp, synthetic construct
  source 1..50: mol_type = other DNA
ccaatgtgctgtattacgtgattattactcaaaaataaacctcaccatca

SEQ ID NO: 49526 - DNA, 50 bp, synthetic construct
  source 1..50: mol_type = other DNA
gtatgcttttataaaccttagtggtggggctaaaatttacacaccactta

SEQ ID NO: 49527 - DNA, 50 bp, synthetic construct
  source 1..50: mol_type = other DNA
catcacaattgatagtgccaagctagagtgggatgaagacagaaaagata

SEQ ID NO: 49528 - DNA, 50 bp, synthetic construct
  source 1..50: mol_type = other DNA
ctcgcagtttgtttgagtcgcttggtcgagcaggagcaacacattcagaa

SEQ ID NO: 49529 - DNA, 50 bp, synthetic construct
  source 1..50: mol_type = other DNA
ctaacccctccgaaataaaaaagcccgcttgcagccagcggatgggtgtt

SEQ ID NO: 49530 - DNA, 50 bp, synthetic construct
  source 1..50: mol_type = other DNA
acatcatggttaattttatgtttaattaaacaaaaattatatctcaccac

SEQ ID NO: 49531 - DNA, 50 bp, synthetic construct
  source 1..50: mol_type = other DNA
aactgtcactaattaagctcagttaacacagaactaatttagtgacagta

SEQ ID NO: 49532 - DNA, 50 bp, synthetic construct
  source 1..50: mol_type = other DNA
ttttatcttagtgttctaatgtatcattattttagaacactaaaataaat

SEQ ID NO: 49533 - DNA, 50 bp, synthetic construct
  source 1..50: mol_type = other DNA
atacggcaacacgctgttcattttccaaagagaaaggagtggcagaactt

SEQ ID NO: 49534 - DNA, 50 bp, synthetic construct
  source 1..50: mol_type = other DNA
catccgtttaagtacatcataaatatatttatattcagagaaaggacgat

SEQ ID NO: 49535 - DNA, 50 bp, synthetic construct
  source 1..50: mol_type = other DNA
cctaaattacaaaaaggaggtttgatcaaaataaattcatgctgtttatc

SEQ ID NO: 49536 - DNA, 50 bp, synthetic construct
  source 1..50: mol_type = other DNA
actggtggtactgcttcagcgtggccgacagcgcgagcagaccagtgaac

SEQ ID NO: 49537 - DNA, 50 bp, synthetic construct
  source 1..50: mol_type = other DNA
taatcatttagactcttttatcatggtaaatttaataatgtacctaattt

SEQ ID NO: 49538 - DNA, 50 bp, synthetic construct
  source 1..50: mol_type = other DNA
tcatagatgaaggcgttatagaaatatttcttagaatagtaaccctatgc

SEQ ID NO: 49539 - DNA, 50 bp, synthetic construct
  source 1..50: mol_type = other DNA
tttagtacctcgttttctctcgttggaagaagaagaaacgagataccaaa

SEQ ID NO: 49540 - DNA, 50 bp, synthetic construct
  source 1..50: mol_type = other DNA
gagtggggcaagtaatgatctgtgaccacagctcagaagctgtttattga

SEQ ID NO: 49541 - DNA, 50 bp, synthetic construct
  source 1..50: mol_type = other DNA
gagtggggcaagtaatgatctgtcaccacagctcagaagctgtttattga

SEQ ID NO: 49542 - DNA, 50 bp, synthetic construct
  source 1..50: mol_type = other DNA
gcctcctaagtcaacgaattttagcacagttactcgttagcttttgatca

SEQ ID NO: 49543 - DNA, 50 bp, synthetic construct
  source 1..50: mol_type = other DNA
catattttaggttattgagcatctgtggggtctcaattttcaaaaattgg

SEQ ID NO: 49544 - DNA, 50 bp, synthetic construct
  source 1..50: mol_type = other DNA
cacagggtgcataagaaagtgaagattttcacttcctaaaacacccttta

SEQ ID NO: 49545 - DNA, 50 bp, synthetic construct
  source 1..50: mol_type = other DNA
aaagcgataaaaataatcacttttccgacgaaatatcgaaacattttgtt

SEQ ID NO: 49546 - DNA, 50 bp, synthetic construct
  source 1..50: mol_type = other DNA
aataaaaatcgcatcacttatgatatcagttgatgatgcggttttttata

SEQ ID NO: 49547 - DNA, 50 bp, synthetic construct
  source 1..50: mol_type = other DNA
ttttttttgttcttctaaagttgcatgctttagaagaagtaaaaaaaata

SEQ ID NO: 49548 - DNA, 50 bp, synthetic construct
  source 1..50: mol_type = other DNA
cagccacccaatggttggcccttttcagtttttaacacattccctgtcta

SEQ ID NO: 49549 - DNA, 50 bp, synthetic construct
  source 1..50: mol_type = other DNA
tttaatatagtacaaagataataaatatcgcgttttaatattaatttaca

SEQ ID NO: 49550 - DNA, 50 bp, synthetic construct
  source 1..50: mol_type = other DNA
attaatgcctatatttttaggcgtattatgttaaaaatatatggaatgta

SEQ ID NO: 49551 - DNA, 50 bp, synthetic construct
  source 1..50: mol_type = other DNA
ccggaaagatgatatactatgtcttgggaattacgatttcattggcaggc

SEQ ID NO: 49552 - DNA, 50 bp, synthetic construct
  source 1..50: mol_type = other DNA
ggaaagatattgccgcttctgaggggaaatttgcagatactgattattac

SEQ ID NO: 49553 - DNA, 50 bp, synthetic construct
  source 1..50: mol_type = other DNA
gtttgccagcccgtcattgcggatcacagcgcatctatgtgctggcaaag

SEQ ID NO: 49554 - DNA, 50 bp, synthetic construct
  source 1..50: mol_type = other DNA
tttttgtattttagtcaaattgataatagaatcaacataagattcgaaat

SEQ ID NO: 49555 - DNA, 50 bp, synthetic construct
  source 1..50: mol_type = other DNA
cacgaagactatgagctagtggacatgtccactgggcagaagtcactagt

SEQ ID NO: 49556 - DNA, 50 bp, synthetic construct
  source 1..50: mol_type = other DNA
taaagcctagaactctttgataaatgactatcaaggcgttcaaggcgaat

SEQ ID NO: 49557 - DNA, 50 bp, synthetic construct
  source 1..50: mol_type = other DNA
caaattgataagcaatgcttttttataaaaaagctgaacgtgaaacatta

SEQ ID NO: 49558 - DNA, 50 bp, synthetic construct
  source 1..50: mol_type = other DNA
agacgaatcggctggtcaggccggtcgcggcctgcgcggcggagatgtcc

SEQ ID NO: 49559 - DNA, 50 bp, synthetic construct
  source 1..50: mol_type = other DNA
tattaaaagtcaagatagtaaagaaggtactaataatggataacttaaat

SEQ ID NO: 49560 - DNA, 50 bp, synthetic construct
  source 1..50: mol_type = other DNA
aacattatttaatacaattaaattataatttattcaaattaatttttata

SEQ ID NO: 49561 - DNA, 50 bp, synthetic construct
  source 1..50: mol_type = other DNA
ctttatatacacgctgtgctcttttaaataaatgcagttaggttgtgttt

SEQ ID NO: 49562 - DNA, 50 bp, synthetic construct
  source 1..50: mol_type = other DNA
ataaaaaaagcctgtatttacaggctcctgtaattactgccactaaatca

SEQ ID NO: 49563 - DNA, 50 bp, synthetic construct
  source 1..50: mol_type = other DNA
aagcgtttatgctttgtcgtcaccttgctgacgaactggctcaagagcta

SEQ ID NO: 49564 - DNA, 50 bp, synthetic construct
  source 1..50: mol_type = other DNA
agtttctctttcatcaatagtttgttagtacgattttagaatatgaagta

SEQ ID NO: 49565 - DNA, 50 bp, synthetic construct
  source 1..50: mol_type = other DNA
tttatgtattcatttcgggctactcaagtagctagtcttgaataccgaaa

SEQ ID NO: 49566 - DNA, 50 bp, synthetic construct
  source 1..50: mol_type = other DNA
cctcatataaatgagatacgattatttatataattgttattaataagagg

SEQ ID NO: 49567 - DNA, 50 bp, synthetic construct
  source 1..50: mol_type = other DNA
gccattgtgactcaccgggcagcagatcaagcgcggtgagcgccatggga

SEQ ID NO: 49568 - DNA, 50 bp, synthetic construct
  source 1..50: mol_type = other DNA
cgctctttcttgttggtgggtgtatgtcaacccgtctatagtaaaatttt

SEQ ID NO: 49569 - DNA, 50 bp, synthetic construct
  source 1..50: mol_type = other DNA
gcgctaatcactcgcgaggcgcgggcccctggctcgcccacaaggagcgc

SEQ ID NO: 49570 - DNA, 50 bp, synthetic construct
  source 1..50: mol_type = other DNA
cgcgctgcagcttggcgcgctcgtcgccgacggcgccaatatcgagacgg

SEQ ID NO: 49571 - DNA, 50 bp, synthetic construct
  source 1..50: mol_type = other DNA
tgttagggaatttttccacaaaggcgcctataaatcaaaaaaggtgttta

SEQ ID NO: 49572 - DNA, 50 bp, synthetic construct
  source 1..50: mol_type = other DNA
ttaataattttagtgactaacatttcaatcaatgtatctaaaactctttg

SEQ ID NO: 49573 - DNA, 50 bp, synthetic construct
  source 1..50: mol_type = other DNA
aagtagagctttttttgtttgcactagtgcaaataaaatcaatatcctaa

SEQ ID NO: 49574 - DNA, 50 bp, synthetic construct
  source 1..50: mol_type = other DNA
cgacatcaagtttggacaataacgctcatcattttccaaacttatattaa

SEQ ID NO: 49575 - DNA, 50 bp, synthetic construct
  source 1..50: mol_type = other DNA
tgtattcctatcctattgacaacacatgtggagtgcatagcgttgataca

SEQ ID NO: 49576 - DNA, 50 bp, synthetic construct
  source 1..50: mol_type = other DNA
tctaaatttacatcttttgtatcaacagattcaatgtgcgttgtcttttg

SEQ ID NO: 49577 - DNA, 50 bp, synthetic construct
  source 1..50: mol_type = other DNA
agtttggacaaaagtgctaccgtctcaacttgttcatcattgtccaaact

SEQ ID NO: 49578 - DNA, 50 bp, synthetic construct
  source 1..50: mol_type = other DNA
ttaggatattgattttatttgcactagtgcaaacaaaaaagctctacttc

SEQ ID NO: 49579 - DNA, 50 bp, synthetic construct
  source 1..50: mol_type = other DNA
tatcatatagttgagattctatcgtcagcaaggcgctcaatggattgttt

SEQ ID NO: 49580 - DNA, 50 bp, synthetic construct
  source 1..50: mol_type = other DNA
ctaagtagggataaagcatttcatgcaattgatggctaaataaagagggc

SEQ ID NO: 49581 - DNA, 50 bp, synthetic construct
  source 1..50: mol_type = other DNA
ctgctcgttgtatcaacacaatagtcaatgtgtgttggtactagtatagg

SEQ ID NO: 49582 - DNA, 50 bp, synthetic construct
  source 1..50: mol_type = other DNA
aactgatacctagattgtatcgtttttgagacactttcaacgtaacggta

SEQ ID NO: 49583 - DNA, 50 bp, synthetic construct
  source 1..50: mol_type = other DNA
ttttctctattcagagagtatgttgccgcgtacatcgcacctagtgtata

SEQ ID NO: 49584 - DNA, 50 bp, synthetic construct
  source 1..50: mol_type = other DNA
atttaatgtatcgattagacggcataatacaaataattgcatgtgcaaat

SEQ ID NO: 49585 - DNA, 50 bp, synthetic construct
  source 1..50: mol_type = other DNA
atgtgttcacttgctagtgaccacacgtggagacgataacgttgctacaa

SEQ ID NO: 49586 - DNA, 50 bp, synthetic construct
  source 1..50: mol_type = other DNA
ttacttccttatgagccactgcctaatggtagatgctcataaggaagtat

SEQ ID NO: 49587 - DNA, 50 bp, synthetic construct
  source 1..50: mol_type = other DNA
aaaaagaagtatatcatggtggtcattaacagcaaattactttttttttt

SEQ ID NO: 49588 - DNA, 50 bp, synthetic construct
  source 1..50: mol_type = other DNA
tcgccgaatagctcaaatacaatgacccttgaatataggctattcgggtt

SEQ ID NO: 49589 - DNA, 50 bp, synthetic construct
  source 1..50: mol_type = other DNA
tctcggtgcgtcgcaacattcatcatcagacacgtttaaatacaccatct

SEQ ID NO: 49590 - DNA, 50 bp, synthetic construct
  source 1..50: mol_type = other DNA
tgaagcggctgaaaaaaccgcatcatgatgcggtttttctgattgattta

SEQ ID NO: 49591 - DNA, 50 bp, synthetic construct
  source 1..50: mol_type = other DNA
atcaatcaaggaagtagatttttttaaaattaatatcctaaaaaatttat

SEQ ID NO: 49592 - DNA, 50 bp, synthetic construct
  source 1..50: mol_type = other DNA
attctttaatgttagataaagacaaatgacattatccaacagaaaacgat

SEQ ID NO: 49593 - DNA, 50 bp, synthetic construct
  source 1..50: mol_type = other DNA
gtttgcgctaaatggaaatatccagtaggacagttcctaaaagtggctaa

SEQ ID NO: 49594 - DNA, 50 bp, synthetic construct
  source 1..50: mol_type = other DNA
tgtatcaacgctatgcactccacatgtgtgttgtctattggataggaaca

SEQ ID NO: 49595 - DNA, 50 bp, synthetic construct
  source 1..50: mol_type = other DNA
ttattaaatataaattttaggtacatatacctaaattattacatttatac

SEQ ID NO: 49596 - DNA, 50 bp, synthetic construct
  source 1..50: mol_type = other DNA
attaaatcgtattataaataagtgcacacatattcgttagtctatttatc

SEQ ID NO: 49597 - DNA, 50 bp, synthetic construct
  source 1..50: mol_type = other DNA
aagtagggctttttttgtttgtactagtgcaattaaaatcaatatcctaa

SEQ ID NO: 49598 - DNA, 50 bp, synthetic construct
  source 1..50: mol_type = other DNA
tgtatttagtttggacaacagtgctatctttattgtccaaaccaaagtca

SEQ ID NO: 49599 - DNA, 50 bp, synthetic construct
  source 1..50: mol_type = other DNA
aattataggtttctagcagtgtctcaagacacctgctaagaaccgcataa

SEQ ID NO: 49600 - DNA, 50 bp, synthetic construct
  source 1..50: mol_type = other DNA
gatgtacaacattgctctttattttcaaatacagattaatattgtataaa

SEQ ID NO: 49601 - DNA, 50 bp, synthetic construct
  source 1..50: mol_type = other DNA
atataaaataccgcctctaagtagggctaaataaagagggcaaaagtaag

SEQ ID NO: 49602 - DNA, 50 bp, synthetic construct
  source 1..50: mol_type = other DNA
ctgataatgagggttcatatctttaaaaagatattaagaaacagcccatg

SEQ ID NO: 49603 - DNA, 50 bp, synthetic construct
  source 1..50: mol_type = other DNA
aggaactgtcctactagtaacacttgcatatgccgtactggataattcca

SEQ ID NO: 49604 - DNA, 50 bp, synthetic construct
  source 1..50: mol_type = other DNA
ttagggtattgattttatttgcactagtgcaaataaaaaaagctctactt

SEQ ID NO: 49605 - DNA, 50 bp, synthetic construct
  source 1..50: mol_type = other DNA
tgtatcaacgctatgcactccacatgtgttgtcaataggataggaataca

SEQ ID NO: 49606 - DNA, 50 bp, synthetic construct
  source 1..50: mol_type = other DNA
tctcaccttgtattttagtcatcgctagaagtttaaaacacaaaattctt

SEQ ID NO: 49607 - DNA, 50 bp, synthetic construct
  source 1..50: mol_type = other DNA
catctcttgtataatcacgctaagtacttgatttgaccgtaactcatctg

SEQ ID NO: 49608 - DNA, 50 bp, synthetic construct
  source 1..50: mol_type = other DNA
ttttttaggatattgattttatttgcaaataaaaaaagctctacttccca

SEQ ID NO: 49609 - DNA, 50 bp, synthetic construct
  source 1..50: mol_type = other DNA
aacaattgcttgacattgtaggggaatgatgacagatacaataaatccat

SEQ ID NO: 49610 - DNA, 50 bp, synthetic construct
  source 1..50: mol_type = other DNA
atgactcagtttgatacttattgatacatcgaacaagggaagattgcgaa

SEQ ID NO: 49611 - DNA, 50 bp, synthetic construct
  source 1..50: mol_type = other DNA
ttaggatattgattttatttgcactagtgcaaataaaaaaagctctactc

SEQ ID NO: 49612 - DNA, 50 bp, synthetic construct
  source 1..50: mol_type = other DNA
tgtctatttcgtgttgtcttgcgagcatacgcccttcgagaaagaagact

SEQ ID NO: 49613 - DNA, 50 bp, synthetic construct
  source 1..50: mol_type = other DNA
ggagagtggaaccaataacatagcatgctctgcaaaaggttccgctgata

SEQ ID NO: 49614 - DNA, 50 bp, synthetic construct
  source 1..50: mol_type = other DNA
gaatgttttcctcccagtgcccagctctgggcactggttcatcgtcagtg

SEQ ID NO: 49615 - DNA, 50 bp, synthetic construct
  source 1..50: mol_type = other DNA
gcatgattgtgtgttcttcaccacaaatggtgatgaacacatattgaact

SEQ ID NO: 49616 - DNA, 50 bp, synthetic construct
  source 1..50: mol_type = other DNA
gacgaggataaaaaattatgttcccaaacgacccatgtggagactatagc

SEQ ID NO: 49617 - DNA, 50 bp, synthetic construct
  source 1..50: mol_type = other DNA
accaggttcggtattatcaagactatattccagcagcagctgaatttgga

SEQ ID NO: 49618 - DNA, 50 bp, synthetic construct
  source 1..50: mol_type = other DNA
taaagagtttgatctgattcgttttgccaagaaaatgatacaagtcgagc

SEQ ID NO: 49619 - DNA, 50 bp, synthetic construct
  source 1..50: mol_type = other DNA
gatgtacaacattgctctttattttcaaatacagaataatgttgaataaa

SEQ ID NO: 49620 - DNA, 50 bp, synthetic construct
  source 1..50: mol_type = other DNA
ttagggtattgattttatttgcattagtgcaaataaaaaaagctctactt

SEQ ID NO: 49621 - DNA, 50 bp, synthetic construct
  source 1..50: mol_type = other DNA
acatcgttttgagtacacaatctcttgacgttatgaacacaaaagaacgt

SEQ ID NO: 49622 - DNA, 50 bp, synthetic construct
  source 1..50: mol_type = other DNA
ccaattcaacgtgtgaaacgctggttcgtccctttccgcaccgccattga

SEQ ID NO: 49623 - DNA, 50 bp, synthetic construct
  source 1..50: mol_type = other DNA
ctcacagatcataagtgcatcataattgcaatgcactatctcatcgcttc

SEQ ID NO: 49624 - DNA, 50 bp, synthetic construct
  source 1..50: mol_type = other DNA
atctttaactaagggaaactggacaactggagtttcccaaacaaaaggat

SEQ ID NO: 49625 - DNA, 50 bp, synthetic construct
  source 1..50: mol_type = other DNA
caatatctttaattaagggaaacgggagtttcccatagttaaagatacca

SEQ ID NO: 49626 - DNA, 50 bp, synthetic construct
  source 1..50: mol_type = other DNA
cttgttgacgttctgcccgccaggcccggacggtccagagcgccaacaag

SEQ ID NO: 49627 - DNA, 50 bp, synthetic construct
  source 1..50: mol_type = other DNA
gagaattattcttatgtgtggataattttttacacatgatagtaattatc

SEQ ID NO: 49628 - DNA, 50 bp, synthetic construct
  source 1..50: mol_type = other DNA
atgaggtttgtgagaattgctattatatcataaatgatgcggttttttct

SEQ ID NO: 49629 - DNA, 50 bp, synthetic construct
  source 1..50: mol_type = other DNA
tcaacaagagtaatatttttaactaaacaaaaagatattaagaaacagcc

SEQ ID NO: 49630 - DNA, 50 bp, synthetic construct
  source 1..50: mol_type = other DNA
ttcgctgattttcttccggcgctccggtggtccgttcctcgtggtgcgtc

SEQ ID NO: 49631 - DNA, 50 bp, synthetic construct
  source 1..50: mol_type = other DNA
tgcgccgtcggcggatgatgcatcacgcgggcgtatccggcgaccttgcg

SEQ ID NO: 49632 - DNA, 50 bp, synthetic construct
  source 1..50: mol_type = other DNA
tgattaaaaagtccttgacaactcgtatgctctaagtgacttcttaatca

SEQ ID NO: 49633 - DNA, 50 bp, synthetic construct
  source 1..50: mol_type = other DNA
cgcccgcagtttgcgtgatcgacgaacatcggatgagcgaacggcgggcg

SEQ ID NO: 49634 - DNA, 50 bp, synthetic construct
  source 1..50: mol_type = other DNA
ggctgtttcttaatatctttttgtttagttaaaaatattactcttgttga

SEQ ID NO: 49635 - DNA, 50 bp, synthetic construct
  source 1..50: mol_type = other DNA
gggcgactggacctttgatgaacgggcgttaatcaggtgatttttattag

SEQ ID NO: 49636 - DNA, 50 bp, synthetic construct
  source 1..50: mol_type = other DNA
taaatagggttcatatctttaactaaacaaaaagatattaagaaacagcc

SEQ ID NO: 49637 - DNA, 50 bp, synthetic construct
  source 1..50: mol_type = other DNA
cacaatatcttgtggtcgttccaccgtctcactgcccggaagaaatcttt

SEQ ID NO: 49638 - DNA, 50 bp, synthetic construct
  source 1..50: mol_type = other DNA
aatgatactcgtggaatacgcgatcgacggcaccgtccccgaggatgccg

SEQ ID NO: 49639 - DNA, 50 bp, synthetic construct
  source 1..50: mol_type = other DNA
gaaaaagcctaccggctgtcccccggctactacagccgccccgcgcggct

SEQ ID NO: 49640 - DNA, 50 bp, synthetic construct
  source 1..50: mol_type = other DNA
attacttatacctccttaacgtatcttaaaagaaaggcaggagtattaac

SEQ ID NO: 49641 - DNA, 50 bp, synthetic construct
  source 1..50: mol_type = other DNA
gcggccgcgccgcgggaggcgatggcagcgtccaccgacggcgaggtagc

SEQ ID NO: 49642 - DNA, 50 bp, synthetic construct
  source 1..50: mol_type = other DNA
ttacatgccaaccaaacttagtttttaaaccagtttgggctggtttttaa

SEQ ID NO: 49643 - DNA, 50 bp, synthetic construct
  source 1..50: mol_type = other DNA
aattagctatttttttgtagctttgtatttcttgagaaaaattgctaata

SEQ ID NO: 49644 - DNA, 50 bp, synthetic construct
  source 1..50: mol_type = other DNA
tttgtcctatacttgacacatccacatggtcgagttataataaggacaag

SEQ ID NO: 49645 - DNA, 50 bp, synthetic construct
  source 1..50: mol_type = other DNA
gattgattataagttatttcacactaccgacagctagcttataacccaag

SEQ ID NO: 49646 - DNA, 50 bp, synthetic construct
  source 1..50: mol_type = other DNA
tcaaggagttctcctcactataagagctattacttctactcactccaaaa

SEQ ID NO: 49647 - DNA, 50 bp, synthetic construct
  source 1..50: mol_type = other DNA
ctaagagttttagatacgctacttgagataagcatatctaaaactcttaa

SEQ ID NO: 49648 - DNA, 50 bp, synthetic construct
  source 1..50: mol_type = other DNA
ttccattgtatttcaaatagtctatatcaaccgtttattagtcaattatc

SEQ ID NO: 49649 - DNA, 50 bp, synthetic construct
  source 1..50: mol_type = other DNA
aaaatttttttgaaagttggtgataaattgtattcactctaaaaagtttg

SEQ ID NO: 49650 - DNA, 50 bp, synthetic construct
  source 1..50: mol_type = other DNA
ttttttcaacttttaaccctgttttaaaacaggggaattgataaaagcct

SEQ ID NO: 49651 - DNA, 50 bp, synthetic construct
  source 1..50: mol_type = other DNA
acattcaaaaaaatagaagtttcctagctatcctttgcatttttttatgt

SEQ ID NO: 49652 - DNA, 50 bp, synthetic construct
  source 1..50: mol_type = other DNA
taacttactaagtaagaatctgacaaccttatggcttacttgtttagctg

SEQ ID NO: 49653 - DNA, 50 bp, synthetic construct
  source 1..50: mol_type = other DNA
gacaactttgaagagcgactagaaaagcggtcgtaacctacaaagttgcg

SEQ ID NO: 49654 - DNA, 50 bp, synthetic construct
  source 1..50: mol_type = other DNA
gataattgacttataaacggttgatatagactatttgaaatacaatggaa

SEQ ID NO: 49655 - DNA, 50 bp, synthetic construct
  source 1..50: mol_type = other DNA
atctatgcggatgagggcatctcagctgagatattactatcatttgggag

SEQ ID NO: 49656 - DNA, 50 bp, synthetic construct
  source 1..50: mol_type = other DNA
aaccttcttatccttacattttaacagaaaaatgaggtgaaaacaatgaa

SEQ ID NO: 49657 - DNA, 50 bp, synthetic construct
  source 1..50: mol_type = other DNA
caaaaacgaaatgctcttacaaaatcatgtctaccgtcctttctgaatga

SEQ ID NO: 49658 - DNA, 50 bp, synthetic construct
  source 1..50: mol_type = other DNA
cctcaatatcctttttctatatctttagatagtctaaaaggttataattt

SEQ ID NO: 49659 - DNA, 50 bp, synthetic construct
  source 1..50: mol_type = other DNA
aacaggggcggctgtacagcggtaaaaaattttgccgttcctatccggca

SEQ ID NO: 49660 - DNA, 50 bp, synthetic construct
  source 1..50: mol_type = other DNA
atatatcactctgaaagccgattatatcaggtgctttctttttaacaccg

SEQ ID NO: 49661 - DNA, 50 bp, synthetic construct
  source 1..50: mol_type = other DNA
tgtagcaacacacaagtctcgacatgtgtcgttactactatcggaacaca

SEQ ID NO: 49662 - DNA, 50 bp, synthetic construct
  source 1..50: mol_type = other DNA
aacatttgacatcatccttctccttaaagaggaggatgattatgaaaatt

SEQ ID NO: 49663 - DNA, 50 bp, synthetic construct
  source 1..50: mol_type = other DNA
ctccccgtgtttcgatgggtgtataatcctaaatgccgcaaccccctaat

SEQ ID NO: 49664 - DNA, 50 bp, synthetic construct
  source 1..50: mol_type = other DNA
taacacctgcttgtcaaagtggtgtttattacgtggacgtacctttatta

SEQ ID NO: 49665 - DNA, 50 bp, synthetic construct
  source 1..50: mol_type = other DNA
tatcctaaaataactaacatcgtgatcactttctttgatcattttggtct

SEQ ID NO: 49666 - DNA, 50 bp, synthetic construct
  source 1..50: mol_type = other DNA
tcgctccctgctgctgcaagccagcaacggcttgcactagcagcgcaaag

SEQ ID NO: 49667 - DNA, 50 bp, synthetic construct
  source 1..50: mol_type = other DNA
atcactgaaagacgctactacttgagtcagtatgggttgcattcgccaat

SEQ ID NO: 49668 - DNA, 50 bp, synthetic construct
  source 1..50: mol_type = other DNA
ctgtcgttaatgaagaggaagcagttttgcaagctcgcaatacacgaaag

SEQ ID NO: 49669 - DNA, 50 bp, synthetic construct
  source 1..50: mol_type = other DNA
atagaagaaatatacgatgtgctaaatgccagataatctatacgatgatc

SEQ ID NO: 49670 - DNA, 50 bp, synthetic construct
  source 1..50: mol_type = other DNA
aatgttgagagcagcaaatatttcttttaatagcgtgaccaatgaagcta

SEQ ID NO: 49671 - DNA, 50 bp, synthetic construct
  source 1..50: mol_type = other DNA
tcgcaactatatatcactctaaagccattacagcttgattattgtgatga

SEQ ID NO: 49672 - DNA, 50 bp, synthetic construct
  source 1..50: mol_type = other DNA
catccccacattgccgactctttcgggatgaagtatgcaatgttatgatt

SEQ ID NO: 49673 - DNA, 50 bp, synthetic construct
  source 1..50: mol_type = other DNA
agttcgtacaactactaatttggtgggcctaacgctaactagtccgaaac

SEQ ID NO: 49674 - DNA, 50 bp, synthetic construct
  source 1..50: mol_type = other DNA
tgggacgaaggtttgaatgaactaatggatccctttcaagccaacgtacc

SEQ ID NO: 49675 - DNA, 50 bp, synthetic construct
  source 1..50: mol_type = other DNA
tccagcagcgcggcttgtttcgagtactcgaaccggggtccgtaaggacc

SEQ ID NO: 49676 - DNA, 50 bp, synthetic construct
  source 1..50: mol_type = other DNA
attttaagaagtgtagcaaacgacccgcgggttgcgccagtccttaaaat

SEQ ID NO: 49677 - DNA, 50 bp, synthetic construct
  source 1..50: mol_type = other DNA
tgtccttacggaccccgtttcgagtactcgaaacaagcacacctactgga

SEQ ID NO: 49678 - DNA, 50 bp, synthetic construct
  source 1..50: mol_type = other DNA
tgtcggttcgagtaagaacgttctggtactcaggcatacgggaagcgccg

SEQ ID NO: 49679 - DNA, 50 bp, synthetic construct
  source 1..50: mol_type = other DNA
tgtccttaaggaccccgtttcgagtattcgaaacaagcgcatctgctgca

SEQ ID NO: 49680 - DNA, 50 bp, synthetic construct
  source 1..50: mol_type = other DNA
tatggctaatgctacaatgccgaatattcggtattaataaaacaggaaat

SEQ ID NO: 49681 - DNA, 50 bp, synthetic construct
  source 1..50: mol_type = other DNA
tcttagaaaaaccgaatagacttcattgtagctattcggcattgtagcat

SEQ ID NO: 49682 - DNA, 50 bp, synthetic construct
  source 1..50: mol_type = other DNA
gaaaatatctgacagatgtctgtagcattagccataacgtttataagttc

SEQ ID NO: 49683 - DNA, 50 bp, synthetic construct
  source 1..50: mol_type = other DNA
ttatggctaatgctacaatgccgaattcggttttctttagatgttcatct

SEQ ID NO: 49684 - DNA, 50 bp, synthetic construct
  source 1..50: mol_type = other DNA
gtgatttataaatatcattcactcataaataatgatattttttaagagaa

SEQ ID NO: 49685 - DNA, 50 bp, synthetic construct
  source 1..50: mol_type = other DNA
acccgaagtacgagtagtcaaagagtacactgacaactatgtccaaacct

SEQ ID NO: 49686 - DNA, 50 bp, synthetic construct
  source 1..50: mol_type = other DNA
ggataaccaatctgagcggctgcaggtgtgctggggcagatgggatatgt

SEQ ID NO: 49687 - DNA, 50 bp, synthetic construct
  source 1..50: mol_type = other DNA
tttccataggttttcgtatcattacgtcggcagcagaaaagctctggaat

SEQ ID NO: 49688 - DNA, 50 bp, synthetic construct
  source 1..50: mol_type = other DNA
aatctgccttgtaatgatttctatctattgacatcatcatgatcaagatt

SEQ ID NO: 49689 - DNA, 50 bp, synthetic construct
  source 1..50: mol_type = other DNA
acaatcatttgatcttattgcatataaatgggattgcttaaaatgcgtcg

SEQ ID NO: 49690 - DNA, 50 bp, synthetic construct
  source 1..50: mol_type = other DNA
ttttgtggtttttttataaaaaatgcagtttttgggagaaatgccgtaga

SEQ ID NO: 49691 - DNA, 50 bp, synthetic construct
  source 1..50: mol_type = other DNA
gtgtgtactaacttatattatccttctggaaactgttggttagtacacat

SEQ ID NO: 49692 - DNA, 50 bp, synthetic construct
  source 1..50: mol_type = other DNA
ggtaactattaaggatactctcaagatgtcgagattcttttcgagttcgc

SEQ ID NO: 49693 - DNA, 50 bp, synthetic construct
  source 1..50: mol_type = other DNA
acacaactgtaatattttaggtatatgtacctaaaatttatatttaataa

SEQ ID NO: 49694 - DNA, 50 bp, synthetic construct
  source 1..50: mol_type = other DNA
caacatattataaatctcatcacttaaagaaatgatatctttaaatctta

SEQ ID NO: 49695 - DNA, 50 bp, synthetic construct
  source 1..50: mol_type = other DNA
ataatatagggtgcttatttccaatattggagaatgtaagaagttcttag

SEQ ID NO: 49696 - DNA, 50 bp, synthetic construct
  source 1..50: mol_type = other DNA
gttatcgccctcttctataaatttggaaatttagtgtgaatcctaataag

SEQ ID NO: 49697 - DNA, 50 bp, synthetic construct
  source 1..50: mol_type = other DNA
aacattctttcctattgtcaaaacgttttttgtttttacaaaaatttgta

SEQ ID NO: 49698 - DNA, 50 bp, synthetic construct
  source 1..50: mol_type = other DNA
ttttgtatcccatttcctctccctccaacgagaggaaatgaggcactaaa

SEQ ID NO: 49699 - DNA, 50 bp, synthetic construct
  source 1..50: mol_type = other DNA
cgtgtttcgatgggtgtataatactaagtgtgtcaacccattattactaa

SEQ ID NO: 49700 - DNA, 50 bp, synthetic construct
  source 1..50: mol_type = other DNA
atattggttataaaaaaccgcatcatgatgcggttttttcagccgcttca

SEQ ID NO: 49701 - DNA, 50 bp, synthetic construct
  source 1..50: mol_type = other DNA
ctaaccgagacgcagaggcgtatcatcataaatgatgcggttttttcttg

SEQ ID NO: 49702 - DNA, 50 bp, synthetic construct
  source 1..50: mol_type = other DNA
ttgggcaaatttgtttagttaagtgagtataataaaacggaaaaacccaa

SEQ ID NO: 49703 - DNA, 50 bp, synthetic construct
  source 1..50: mol_type = other DNA
attgttttcggttgcttgcttctttaaagaagtaatagaagtgtaaaaaa

SEQ ID NO: 49704 - DNA, 50 bp, synthetic construct
  source 1..50: mol_type = other DNA
aagtatcgctatctaaccccagcaaataatgaggtgtgatagcgatagcg

SEQ ID NO: 49705 - DNA, 50 bp, synthetic construct
  source 1..50: mol_type = other DNA
agtttggacaatgatacacatattgagacggtatgtttattgtccaaact

SEQ ID NO: 49706 - DNA, 50 bp, synthetic construct
  source 1..50: mol_type = other DNA
ttcaaaggaaagagaactcctacctaggtaaaaatatgggggtttttaat

SEQ ID NO: 49707 - DNA, 50 bp, synthetic construct
  source 1..50: mol_type = other DNA
ggttcaatatttcatctgttaagggtacttgaagggacgaacggtgattt

SEQ ID NO: 49708 - DNA, 50 bp, synthetic construct
  source 1..50: mol_type = other DNA
aactaatattcttatatgtcatttttaaacaatatataagaaaactagtt

SEQ ID NO: 49709 - DNA, 50 bp, synthetic construct
  source 1..50: mol_type = other DNA
cgtagcaacgccacagtctccacatgtgtttgaactactatgtgaacata

SEQ ID NO: 49710 - DNA, 50 bp, synthetic construct
  source 1..50: mol_type = other DNA
ctatcaaattatcatttgttactttaaagaagtaatagaagtgtaaaaaa

SEQ ID NO: 49711 - DNA, 50 bp, synthetic construct
  source 1..50: mol_type = other DNA
gaaagtaactaaaataaagaattttaaaactctttatttacaaaaaaata

SEQ ID NO: 49712 - DNA, 50 bp, synthetic construct
  source 1..50: mol_type = other DNA
caatatctttaattaagggagacgggagtttcccatagttaaagatacca

SEQ ID NO: 49713 - DNA, 50 bp, synthetic construct
  source 1..50: mol_type = other DNA
aagataataattatagttgtacctgcaggtacaactaaattaaatattaa

SEQ ID NO: 49714 - DNA, 50 bp, synthetic construct
  source 1..50: mol_type = other DNA
ttttgcacctgattgacacaatcagatgattgagttataataggacaaaa

SEQ ID NO: 49715 - DNA, 50 bp, synthetic construct
  source 1..50: mol_type = other DNA
gaggcgtcgagttcgactgcttccccaaaagaggaagcgtcgaactcttc

SEQ ID NO: 49716 - DNA, 50 bp, synthetic construct
  source 1..50: mol_type = other DNA
ttaaatgacatcaatatctttaactagataaagataccacaccattccca

SEQ ID NO: 49717 - DNA, 50 bp, synthetic construct
  source 1..50: mol_type = other DNA
ggcttttttgtgggataaaagaactactttcgttgtcccaacaaagttcc

SEQ ID NO: 49718 - DNA, 50 bp, synthetic construct
  source 1..50: mol_type = other DNA
agtcccaagtttcaggatgtgtcaatgaacacatccttaattaatcaact

SEQ ID NO: 49719 - DNA, 50 bp, synthetic construct
  source 1..50: mol_type = other DNA
tggtatctttaactatgggaaactcccgtttcccttaattaaagatattg

SEQ ID NO: 49720 - DNA, 50 bp, synthetic construct
  source 1..50: mol_type = other DNA
aggtataactttgaaaagtcaaataatgttaagttgttaaagttatacct

SEQ ID NO: 49721 - DNA, 50 bp, synthetic construct
  source 1..50: mol_type = other DNA
agtatgaaagaaccacaaaaaagctccttagatggtgtaaataagaaaaa

SEQ ID NO: 49722 - DNA, 50 bp, synthetic construct
  source 1..50: mol_type = other DNA
atttaatcataaaagttattagtttaaactaaaaacattcttgattaaaa

SEQ ID NO: 49723 - DNA, 50 bp, synthetic construct
  source 1..50: mol_type = other DNA
agttatattttaatatatatatcttcagataaatgtattaaagttcctat

SEQ ID NO: 49724 - DNA, 50 bp, synthetic construct
  source 1..50: mol_type = other DNA
cgcagatgggaattggttatcaaaattttgcaacccaaaagtgtttgatt

SEQ ID NO: 49725 - DNA, 50 bp, synthetic construct
  source 1..50: mol_type = other DNA
gttttcttgcggggtctcaatgtggtaacattgagataccagcaaaatgt

SEQ ID NO: 49726 - DNA, 50 bp, synthetic construct
  source 1..50: mol_type = other DNA
attaactctttatgcatttaatataagcattaattgcaaaattttttaaa

SEQ ID NO: 49727 - DNA, 50 bp, synthetic construct
  source 1..50: mol_type = other DNA
attcatagaaaaataatggcgcaatattgcgccatttgaaaaagagatat

SEQ ID NO: 49728 - DNA, 50 bp, synthetic construct
  source 1..50: mol_type = other DNA
taaagatatcattcactcatgataccgtaccacaaataatgatattttta

SEQ ID NO: 49729 - DNA, 50 bp, synthetic construct
  source 1..50: mol_type = other DNA
ccaaaggttcaatatttcatccgttaagggacgaatcgtgtttttcacgg

SEQ ID NO: 49730 - DNA, 50 bp, synthetic construct
  source 1..50: mol_type = other DNA
tgtatgaaaatccagttagatcagccagtatttatgtggatttctttaca

SEQ ID NO: 49731 - DNA, 50 bp, synthetic construct
  source 1..50: mol_type = other DNA
ctatacactactataaactgtactccagattgtttggtaaaatgtagcca

SEQ ID NO: 49732 - DNA, 50 bp, synthetic construct
  source 1..50: mol_type = other DNA
aatggtagtattatgtgcaaatgttttcacttacacataatactatcata

SEQ ID NO: 49733 - DNA, 50 bp, synthetic construct
  source 1..50: mol_type = other DNA
cacataaaagattaaaccatgttcaagaacacggttttaaattttatgtc

SEQ ID NO: 49734 - DNA, 50 bp, synthetic construct
  source 1..50: mol_type = other DNA
atcctatattacccatacctataaatttgcaggtacgtgtaataagttct

SEQ ID NO: 49735 - DNA, 50 bp, synthetic construct
  source 1..50: mol_type = other DNA
atttaatcgcaaatgttttatgctttaatttaaaacatttgcgataaaac

SEQ ID NO: 49736 - DNA, 50 bp, synthetic construct
  source 1..50: mol_type = other DNA
gttagatttggaggctacacaatcattacgggtgtaccaccatttctaac

SEQ ID NO: 49737 - DNA, 50 bp, synthetic construct
  source 1..50: mol_type = other DNA
actttcagtatgtatcttggaacatttctccatagatacatactgagttt

SEQ ID NO: 49738 - DNA, 50 bp, synthetic construct
  source 1..50: mol_type = other DNA
ttgataaaatagaaatggtctcgtcattcagtaaatagtccttttacatt

SEQ ID NO: 49739 - DNA, 50 bp, synthetic construct
  source 1..50: mol_type = other DNA
agttaagatgaagtatcatcttaattgtaagatttagctcttttggaagt

SEQ ID NO: 49740 - DNA, 50 bp, synthetic construct
  source 1..50: mol_type = other DNA
tatgcaagtgatttctttatgttgaacaacagaataaatactttaaccat

SEQ ID NO: 49741 - DNA, 50 bp, synthetic construct
  source 1..50: mol_type = other DNA
gagtgagcagacctacacactcgatgtctacttagtatcttcctactatg

SEQ ID NO: 49742 - DNA, 50 bp, synthetic construct
  source 1..50: mol_type = other DNA
ctcatgttttcttattaggaggcgggtgcctcccgataagaaaacatcgt

SEQ ID NO: 49743 - DNA, 50 bp, synthetic construct
  source 1..50: mol_type = other DNA
aatattagtaaaaacctcatttactttcaagtgaggtttttacattattt

SEQ ID NO: 49744 - DNA, 50 bp, synthetic construct
  source 1..50: mol_type = other DNA
aattaatgttgcatttctgttctcatgagaataaaaagacaacatataaa

SEQ ID NO: 49745 - DNA, 50 bp, synthetic construct
  source 1..50: mol_type = other DNA
gctcaaaaactcattggggtgaggatcctatcgccaatggggttttactc

SEQ ID NO: 49746 - DNA, 50 bp, synthetic construct
  source 1..50: mol_type = other DNA
ctgaaaaaaccgcatcatttatgatatcggttaagagtgcggttttttat

SEQ ID NO: 49747 - DNA, 50 bp, synthetic construct
  source 1..50: mol_type = other DNA
ttataaaaaccccagtataaaacgatcataagtgatgcggtttttattaa

SEQ ID NO: 49748 - DNA, 50 bp, synthetic construct
  source 1..50: mol_type = other DNA
aagaaaaaaccgcatcatttatgatatcaggtagtgatgcggttttttta

SEQ ID NO: 49749 - DNA, 50 bp, synthetic construct
  source 1..50: mol_type = other DNA
ccaatgctcaattggtttctttttttagaaataatagaaattcaaatgaa

SEQ ID NO: 49750 - DNA, 50 bp, synthetic construct
  source 1..50: mol_type = other DNA
cgggatttttccgccagcaccgcacgtatggtgtgtgcgacattatccat

SEQ ID NO: 49751 - DNA, 50 bp, synthetic construct
  source 1..50: mol_type = other DNA
acgcttttattcatctccgacctcctaaggcaaacgatctgaaagtctat

SEQ ID NO: 49752 - DNA, 50 bp, synthetic construct
  source 1..50: mol_type = other DNA
atgaactgattgacattgaagactaccgtctgcaattctgattatatcat

SEQ ID NO: 49753 - DNA, 50 bp, synthetic construct
  source 1..50: mol_type = other DNA
cccctaccgcgtattataacgataggtaatgttgcaatcagcggtatcct

SEQ ID NO: 49754 - DNA, 50 bp, synthetic construct
  source 1..50: mol_type = other DNA
ttttgctaaggaaagtataaaaaataatttatatttttttattattaaat

SEQ ID NO: 49755 - DNA, 50 bp, synthetic construct
  source 1..50: mol_type = other DNA
gattcttttgtaatttactcttgataaccatagtataataaataatagta

SEQ ID NO: 49756 - DNA, 50 bp, synthetic construct
  source 1..50: mol_type = other DNA
tcgtttatatcctaaattttcaagttgttgaagtaacgattgagattgtt

SEQ ID NO: 49757 - DNA, 50 bp, synthetic construct
  source 1..50: mol_type = other DNA
caaaagaaaaagccctcccgcgcaggtatcgcgggtgacttcttctttgc

SEQ ID NO: 49758 - DNA, 50 bp, synthetic construct
  source 1..50: mol_type = other DNA
cacaaggaaaataaaaattttgctgcggcgcgatttttggggcgtttgat

SEQ ID NO: 49759 - DNA, 50 bp, synthetic construct
  source 1..50: mol_type = other DNA
cgcatcaccaagcgataagcagaggcctatcataagtgatgcggttttta

SEQ ID NO: 49760 - DNA, 50 bp, synthetic construct
  source 1..50: mol_type = other DNA
tcgggagggtctgcggcgagggccgcgaccaccagagcggcgccccccgg

SEQ ID NO: 49761 - DNA, 50 bp, synthetic construct
  source 1..50: mol_type = other DNA
gaatttttttagtattcaagactagcccgaaatgaatacataaaataatt

SEQ ID NO: 49762 - DNA, 50 bp, synthetic construct
  source 1..50: mol_type = other DNA
caggccatggtggctctgaccctggcccgcaccagcgccaccattaccta

SEQ ID NO: 49763 - DNA, 50 bp, synthetic construct
  source 1..50: mol_type = other DNA
gagaaatacacaaatggtagaatattgactcgaattttttctattttcat

SEQ ID NO: 49764 - DNA, 50 bp, synthetic construct
  source 1..50: mol_type = other DNA
ctaaaatgggggttaaaatgtttatttaaaacttgagcttatcatttttt

SEQ ID NO: 49765 - DNA, 50 bp, synthetic construct
  source 1..50: mol_type = other DNA
ttgtatgcgattgcggtattattatgcttgcttttacagagcatatcatg

SEQ ID NO: 49766 - DNA, 50 bp, synthetic construct
  source 1..50: mol_type = other DNA
cggaggggcagggtgatggcgggtgccaccgccagcaccgacagtggccg

SEQ ID NO: 49767 - DNA, 50 bp, synthetic construct
  source 1..50: mol_type = other DNA
aagagggggcggcgatgagtccacgcgcaggaacatcgtgtaccgctccc

SEQ ID NO: 49768 - DNA, 50 bp, synthetic construct
  source 1..50: mol_type = other DNA
aatatcctgccgggctgccgattcatgaatcggcagactatcaaatacgg

SEQ ID NO: 49769 - DNA, 50 bp, synthetic construct
  source 1..50: mol_type = other DNA
ctcctttatcctgattccgcaaaaccttttttcatatactcaaaaaggat

SEQ ID NO: 49770 - DNA, 50 bp, synthetic construct
  source 1..50: mol_type = other DNA
ttccgtcggtgctggttcgccacaccgcccacctggcagcctcgcccgaa

SEQ ID NO: 49771 - DNA, 50 bp, synthetic construct
  source 1..50: mol_type = other DNA
tttctaataaaatttagaattaaaagaggaatttgaaattataggagaag

SEQ ID NO: 49772 - DNA, 50 bp, synthetic construct
  source 1..50: mol_type = other DNA
ttataaaagggctctatttatttgaacgatattatattacctttttttat

SEQ ID NO: 49773 - DNA, 50 bp, synthetic construct
  source 1..50: mol_type = other DNA
tggttacatccctgccaactaaaccagtataatcgctcatcatctaccct

SEQ ID NO: 49774 - DNA, 50 bp, synthetic construct
  source 1..50: mol_type = other DNA
ggagatgacctcaaaagattacctatgcgttcctaattgaaaagattagg

SEQ ID NO: 49775 - DNA, 50 bp, synthetic construct
  source 1..50: mol_type = other DNA
ataatttatattttttgtattttgatgacatactagacaatataaatgat

SEQ ID NO: 49776 - DNA, 50 bp, synthetic construct
  source 1..50: mol_type = other DNA
tctcgtgttaccagtcgctccggctggtcggagttgatggattcactaca

SEQ ID NO: 49777 - DNA, 50 bp, synthetic construct
  source 1..50: mol_type = other DNA
aagtacgatttagatacgttactgtatagaatgatacccaaatcgtacat

SEQ ID NO: 49778 - DNA, 50 bp, synthetic construct
  source 1..50: mol_type = other DNA
catcgcatttttgtgatgagagcatcagtactcttaataaaagtgcaatg

SEQ ID NO: 49779 - DNA, 50 bp, synthetic construct
  source 1..50: mol_type = other DNA
gacatcaataatgaacactcgagccatgttgagtgcgtagtattgatgtc

SEQ ID NO: 49780 - DNA, 50 bp, synthetic construct
  source 1..50: mol_type = other DNA
tgtgccgagctggcgccgagcgcgcccgcgcttcggttaagctcgcgctt

SEQ ID NO: 49781 - DNA, 50 bp, synthetic construct
  source 1..50: mol_type = other DNA
aaaggttcaatatttcatccgttaagggacgaatcgtgtttttcacggtt

SEQ ID NO: 49782 - DNA, 50 bp, synthetic construct
  source 1..50: mol_type = other DNA
aaagtacaccgggttcggcttcgcgcttgacggcgcaaaagctgaacctt

SEQ ID NO: 49783 - DNA, 50 bp, synthetic construct
  source 1..50: mol_type = other DNA
gcttgtattttggttttgcttctttaaagaagtaatagaagtgtaaaaaa

SEQ ID NO: 49784 - DNA, 50 bp, synthetic construct
  source 1..50: mol_type = other DNA
taatatccttttgtttgggaaactccgctttcccttagttaaagatataa

SEQ ID NO: 49785 - DNA, 50 bp, synthetic construct
  source 1..50: mol_type = other DNA
ttgggtttttccgttttattatactcgcttaactaaacagacttgcccaa

SEQ ID NO: 49786 - DNA, 50 bp, synthetic construct
  source 1..50: mol_type = other DNA
aataatccctatctgaccgctcctaaagaagcgttcacttagggattgaa

SEQ ID NO: 49787 - DNA, 50 bp, synthetic construct
  source 1..50: mol_type = other DNA
atcgggtgttattgggggttgactaccatgtacccacaataacacgaggg

SEQ ID NO: 49788 - DNA, 50 bp, synthetic construct
  source 1..50: mol_type = other DNA
gatgtacaacattactctttattttcaaatacagaataatgttgcatata

SEQ ID NO: 49789 - DNA, 50 bp, synthetic construct
  source 1..50: mol_type = other DNA
tataacaaaacgtatggttgcaaaattgatgaaaacaactagtatttata

SEQ ID NO: 49790 - DNA, 50 bp, synthetic construct
  source 1..50: mol_type = other DNA
agggcgttttagcttttctacaattttttgtataaaatgctcgaaaccag

SEQ ID NO: 49791 - DNA, 50 bp, synthetic construct
  source 1..50: mol_type = other DNA
aattattaatgatattaatatgtttaactcttttatatatcttattaaag

SEQ ID NO: 49792 - DNA, 50 bp, synthetic construct
  source 1..50: mol_type = other DNA
ttggtctgagatatacaagaaaagacgttttcttgtacctattttatcaa

SEQ ID NO: 49793 - DNA, 50 bp, synthetic construct
  source 1..50: mol_type = other DNA
ccataaatataaaaaggtacttgacataatattaactgaacaggagtgat

SEQ ID NO: 49794 - DNA, 50 bp, synthetic construct
  source 1..50: mol_type = other DNA
cgattccttttttactatctaactcagacaagagtagagcctactaatat

SEQ ID NO: 49795 - DNA, 50 bp, synthetic construct
  source 1..50: mol_type = other DNA
aatcgggtgttattgggggttgactatcatgtacccatcaacacgagaga

SEQ ID NO: 49796 - DNA, 50 bp, synthetic construct
  source 1..50: mol_type = other DNA
catccattcagacaccggttcgagtactcgaaccttgcctacctagcaga

SEQ ID NO: 49797 - DNA, 50 bp, synthetic construct
  source 1..50: mol_type = other DNA
agtttggaaaatgatgagcaagttgagacggtagcattattgtccaaact

SEQ ID NO: 49798 - DNA, 50 bp, synthetic construct
  source 1..50: mol_type = other DNA
tgtagcaacacacaagtctccacatgtgtcgttactactatcggaacaca

SEQ ID NO: 49799 - DNA, 50 bp, synthetic construct
  source 1..50: mol_type = other DNA
taatatccttttgtttgggaaactccgctttcccttagttaaagatatga

SEQ ID NO: 49800 - DNA, 50 bp, synthetic construct
  source 1..50: mol_type = other DNA
atctttaactatgggaaactccagttgtcccgtttcccttaattaaagat

SEQ ID NO: 49801 - DNA, 50 bp, synthetic construct
  source 1..50: mol_type = other DNA
tcatatctttaactaagggaaactggagtttcccaaacaaaaggatatta

SEQ ID NO: 49802 - DNA, 50 bp, synthetic construct
  source 1..50: mol_type = other DNA
aggttttttgtgggaaagaagtactagctacagtttcaacttgctcatca

SEQ ID NO: 49803 - DNA, 50 bp, synthetic construct
  source 1..50: mol_type = other DNA
tcatatctttaactaagggaaagcggagtttcccaaacaaaagaatatta

SEQ ID NO: 49804 - DNA, 50 bp, synthetic construct
  source 1..50: mol_type = other DNA
tttgtaccccttgtacaccgatgtttgcaacggtgtacaaagggaacata

SEQ ID NO: 49805 - DNA, 50 bp, synthetic construct
  source 1..50: mol_type = other DNA
cgtctttgtagcaacacacaagtctctcacaatgtgtcgttactactatc

SEQ ID NO: 49806 - DNA, 50 bp, synthetic construct
  source 1..50: mol_type = other DNA
ttaatataagtttggaaaatgatgagcgttattgtccaaacttgatgtcg

SEQ ID NO: 49807 - DNA, 50 bp, synthetic construct
  source 1..50: mol_type = other DNA
tatacctgcggaacgaaatgcgttatcacacccaaagtaatggaggtata

SEQ ID NO: 49808 - DNA, 50 bp, synthetic construct
  source 1..50: mol_type = other DNA
tataagcgctagaattaaccgatatgttacctttaatatcaaatattatg

SEQ ID NO: 49809 - DNA, 50 bp, synthetic construct
  source 1..50: mol_type = other DNA
tgacctcggcttattcccactcgatgtccatttggcattagttgattcca

SEQ ID NO: 49810 - DNA, 50 bp, synthetic construct
  source 1..50: mol_type = other DNA
atataatattaacattcatgaagatttcttcttgctaattcgaatggatc

SEQ ID NO: 49811 - DNA, 50 bp, synthetic construct
  source 1..50: mol_type = other DNA
atctttaattaagggaaacgggacaactggagtttcccatagttaaagat

SEQ ID NO: 49812 - DNA, 50 bp, synthetic construct
  source 1..50: mol_type = other DNA
ataataaaaaccttcaaaaaaatcttgattacgctgtcggtttttcccgg

SEQ ID NO: 49813 - DNA, 50 bp, synthetic construct
  source 1..50: mol_type = other DNA
caaaatacaccaaatttaaagagacctctctttccattttttcttttttg

SEQ ID NO: 49814 - DNA, 50 bp, synthetic construct
  source 1..50: mol_type = other DNA
gtaagaagtatatccacaaaacgatcctgaaaatatgagatacatgttaa

SEQ ID NO: 49815 - DNA, 50 bp, synthetic construct
  source 1..50: mol_type = other DNA
gggataagaggaaggttgcaggctatggcggagatccttcttccgtagaa

SEQ ID NO: 49816 - DNA, 50 bp, synthetic construct
  source 1..50: mol_type = other DNA
caaatttttaattagctgcttcttttaagaggcgtagaaaagacaattaa

SEQ ID NO: 49817 - DNA, 50 bp, synthetic construct
  source 1..50: mol_type = other DNA
gataggcagctataaaaaacgcagggcaggcatttttatagctgccatct

SEQ ID NO: 49818 - DNA, 50 bp, synthetic construct
  source 1..50: mol_type = other DNA
ttgtgtgggatcatgctttgatgggattatcgaagccgcccaggaagagg

SEQ ID NO: 49819 - DNA, 50 bp, synthetic construct
  source 1..50: mol_type = other DNA
ccttatcagtctatgaaaaaggagcagcctttggttttatgcccatttca

SEQ ID NO: 49820 - DNA, 50 bp, synthetic construct
  source 1..50: mol_type = other DNA
cgaatggtgcttttgggatagttgcaaaaaattcacaaaagcaccctgtg

SEQ ID NO: 49821 - DNA, 50 bp, synthetic construct
  source 1..50: mol_type = other DNA
cattttcggcattatctctgataaatacatcaaaacagctgtgatttcca

SEQ ID NO: 49822 - DNA, 50 bp, synthetic construct
  source 1..50: mol_type = other DNA
agttgtggactacgccattacccgcatggtctatggtgcagtcgatcacg

SEQ ID NO: 49823 - DNA, 50 bp, synthetic construct
  source 1..50: mol_type = other DNA
tctgcatccgctcctttccttttttgaaattgtcattgaccggattgaag

SEQ ID NO: 49824 - DNA, 50 bp, synthetic construct
  source 1..50: mol_type = other DNA
aaatgaaatttgctcacaagggaattataaatagcgaaatttacacattt

SEQ ID NO: 49825 - DNA, 50 bp, synthetic construct
  source 1..50: mol_type = other DNA
tcggtgaacgcgctggtcattatcgcgccgcgcaccagggcggccaccag

SEQ ID NO: 49826 - DNA, 50 bp, synthetic construct
  source 1..50: mol_type = other DNA
cttaccatgtatggcctttctcctaaaaattgtgagctatttttgttata

SEQ ID NO: 49827 - DNA, 50 bp, synthetic construct
  source 1..50: mol_type = other DNA
ttcattgttatgcccatgccagtaaatactctgatcgtggtactgttgaa

SEQ ID NO: 49828 - DNA, 50 bp, synthetic construct
  source 1..50: mol_type = other DNA
aaaaccggtatatattattatattatatctttttaatatatactcctttt

SEQ ID NO: 49829 - DNA, 50 bp, synthetic construct
  source 1..50: mol_type = other DNA
ccaccccttaaataattaaatgacaaatttgagtagaatttaaggggtat

SEQ ID NO: 49830 - DNA, 50 bp, synthetic construct
  source 1..50: mol_type = other DNA
attactccttttcatttttgtatattagctaaaatatgaaatttacttct

SEQ ID NO: 49831 - DNA, 50 bp, synthetic construct
  source 1..50: mol_type = other DNA
gatcttgcgcttccctaggttgttccgtcagtacatatttatgaaagaat

SEQ ID NO: 49832 - DNA, 50 bp, synthetic construct
  source 1..50: mol_type = other DNA
gaccggctgtccccaggtcgaccccgaagtcgatctggtagataattttc

SEQ ID NO: 49833 - DNA, 50 bp, synthetic construct
  source 1..50: mol_type = other DNA
taaagtcggtgaattgtgcgtcgtgcacaacccgttaacggatcgtcgtt

SEQ ID NO: 49834 - DNA, 50 bp, synthetic construct
  source 1..50: mol_type = other DNA
tcatcgtcgaaaagaccggcaagcgcggcagcaccatgccgaatcgatgg

SEQ ID NO: 49835 - DNA, 50 bp, synthetic construct
  source 1..50: mol_type = other DNA
agcaatgttaatcataaactatgaattcgcagtataaaaaagacatcgct

SEQ ID NO: 49836 - DNA, 50 bp, synthetic construct
  source 1..50: mol_type = other DNA
gccgggtttgtgcgtaggggtccaattagaccccatccagatcagagccg

SEQ ID NO: 49837 - DNA, 50 bp, synthetic construct
  source 1..50: mol_type = other DNA
atggaaccttttgcagagcatatccagacatgctatgttattggttccac

SEQ ID NO: 49838 - DNA, 50 bp, synthetic construct
  source 1..50: mol_type = other DNA
cgattgaatcgccgcgacttccagcgccggaaaacgcacccgatcccgcg

SEQ ID NO: 49839 - DNA, 50 bp, synthetic construct
  source 1..50: mol_type = other DNA
tggtgataaagtgcaagacagaattaatattatattaattcatataattt

SEQ ID NO: 49840 - DNA, 50 bp, synthetic construct
  source 1..50: mol_type = other DNA
accgtgatccgatttttctctatcatgaagaaagcgagcacgcaatagga

SEQ ID NO: 49841 - DNA, 50 bp, synthetic construct
  source 1..50: mol_type = other DNA
tatattgttatatatgtatcctacatgtaggataaacagtaaaaaacttc

SEQ ID NO: 49842 - DNA, 50 bp, synthetic construct
  source 1..50: mol_type = other DNA
tggggttatttcagatactttaacagctcactgtatctggtatcacccca

SEQ ID NO: 49843 - DNA, 50 bp, synthetic construct
  source 1..50: mol_type = other DNA
ctaatgataaataatgcagttaagatgtctactgcaaaacatgactataa

SEQ ID NO: 49844 - DNA, 50 bp, synthetic construct
  source 1..50: mol_type = other DNA
cagtacccataatcgtcccattctccatattgtaccgaaaacgggaactg

SEQ ID NO: 49845 - DNA, 50 bp, synthetic construct
  source 1..50: mol_type = other DNA
aaagggttaatattgccagcaatagtgcttgttggtattatttacctttt

SEQ ID NO: 49846 - DNA, 50 bp, synthetic construct
  source 1..50: mol_type = other DNA
agacattatacttgatatgctaattagatagcagatcatataactctact

SEQ ID NO: 49847 - DNA, 50 bp, synthetic construct
  source 1..50: mol_type = other DNA
tagatgcgatactaatagcaccccaagagtgggtgatagcatcgcaatcc

SEQ ID NO: 49848 - DNA, 50 bp, synthetic construct
  source 1..50: mol_type = other DNA
tgcgtttttaaaatggttgtgtaataatacacaacctttttaaagtttgc

SEQ ID NO: 49849 - DNA, 50 bp, synthetic construct
  source 1..50: mol_type = other DNA
agacattatacttgatatgctaattaaatcgcaaatcatagcattttact

SEQ ID NO: 49850 - DNA, 50 bp, synthetic construct
  source 1..50: mol_type = other DNA
ccacagaagaagataagggttgcagcaggaaaccaaatattcagatttgg

SEQ ID NO: 49851 - DNA, 50 bp, synthetic construct
  source 1..50: mol_type = other DNA
gtatcatcttccttttcttcttccggagagtggaaagcggatgatgttac

SEQ ID NO: 49852 - DNA, 50 bp, synthetic construct
  source 1..50: mol_type = other DNA
ctgttttatccagtactagcgccgtatgcagcaatagcttcacgttggcg

SEQ ID NO: 49853 - DNA, 50 bp, synthetic construct
  source 1..50: mol_type = other DNA
aatagaaataaacggccttcacacgcgtgcgtaggcggcgaccttgcgtc

SEQ ID NO: 49854 - DNA, 50 bp, synthetic construct
  source 1..50: mol_type = other DNA
gtctttccatagcaagatccaaggcatttcattcaaccccgattaaaata

SEQ ID NO: 49855 - DNA, 50 bp, synthetic construct
  source 1..50: mol_type = other DNA
tatacatcactctaaagagctgaaatttctgaaggttatgcggatatctt

SEQ ID NO: 49856 - DNA, 50 bp, synthetic construct
  source 1..50: mol_type = other DNA
tcaaaatgcatcaaagccaaagcgtatcctttaagcacaaagcagccaga

SEQ ID NO: 49857 - DNA, 50 bp, synthetic construct
  source 1..50: mol_type = other DNA
atttctttatcaaatctttccatcaatatggctctgttggaataacctca

SEQ ID NO: 49858 - DNA, 50 bp, synthetic construct
  source 1..50: mol_type = other DNA
atactcaaactgatttagcccaagctgttcttcctgatctgtagaaaccc

SEQ ID NO: 49859 - DNA, 50 bp, synthetic construct
  source 1..50: mol_type = other DNA
cgttgtactaacttaacacagcccacgggcagtgttcaattagtacaaca

SEQ ID NO: 49860 - DNA, 50 bp, synthetic construct
  source 1..50: mol_type = other DNA
tgagctacgggcgcatcgatattcaggtcagatcacgcgcctcaagctcg

SEQ ID NO: 49861 - DNA, 50 bp, synthetic construct
  source 1..50: mol_type = other DNA
acgcggtgcgatcttgagcaaaagatcgtttcatgaagatcgcactctac

SEQ ID NO: 49862 - DNA, 50 bp, synthetic construct
  source 1..50: mol_type = other DNA
cgcggtcgcgtgccacgccgcggcgagtcgcaccgcgtgacgcttcgccg

SEQ ID NO: 49863 - DNA, 50 bp, synthetic construct
  source 1..50: mol_type = other DNA
aacagttttcacttaaaaaatcttcttcttctctttgttcacctactatt

SEQ ID NO: 49864 - DNA, 50 bp, synthetic construct
  source 1..50: mol_type = other DNA
cagctttagtcacaatgggacaccttacaaagtacatttgaacaagccat

SEQ ID NO: 49865 - DNA, 50 bp, synthetic construct
  source 1..50: mol_type = other DNA
tatatgcgatactaatagtaacccaagaattagtaatagtatcgcaatct

SEQ ID NO: 49866 - DNA, 50 bp, synthetic construct
  source 1..50: mol_type = other DNA
agtaataatttcaattagccctgcaaaaggggctaaaaatcattctacct

SEQ ID NO: 49867 - DNA, 50 bp, synthetic construct
  source 1..50: mol_type = other DNA
catagcgctatacgaacagattatgcgtagtcaattcgtatgagcagatc

SEQ ID NO: 49868 - DNA, 50 bp, synthetic construct
  source 1..50: mol_type = other DNA
tctgatatttcttattttcttgattttatgttaaaagctgttatatatgc

SEQ ID NO: 49869 - DNA, 50 bp, synthetic construct
  source 1..50: mol_type = other DNA
ctgtaaggttaaatcttacaggtattaacctgtaattttttcggtaggtc

SEQ ID NO: 49870 - DNA, 50 bp, synthetic construct
  source 1..50: mol_type = other DNA
gaagcttaccttctgattttctcattacataaaatgagatggaactattc

SEQ ID NO: 49871 - DNA, 50 bp, synthetic construct
  source 1..50: mol_type = other DNA
gtgatttaagacataatctcggccagctacattcttatcttttagcccaa

SEQ ID NO: 49872 - DNA, 50 bp, synthetic construct
  source 1..50: mol_type = other DNA
tgatatcggcgaggtcgggcaggtcgactttcccgaccctggcgggccga

SEQ ID NO: 49873 - DNA, 50 bp, synthetic construct
  source 1..50: mol_type = other DNA
caaagaattttagtatcttttattgaaatacaggatagtaaaattcttta

SEQ ID NO: 49874 - DNA, 50 bp, synthetic construct
  source 1..50: mol_type = other DNA
ggtaatttcaacagtttctgatagtgcttctgtcactcaaactcttcata

SEQ ID NO: 49875 - DNA, 50 bp, synthetic construct
  source 1..50: mol_type = other DNA
aagatttgaatataggtttggacaattgtccaaacttgatgtcgataagc

SEQ ID NO: 49876 - DNA, 50 bp, synthetic construct
  source 1..50: mol_type = other DNA
attcctgtaaatcttgcgtaatactgctttttaatataatttacaggaaa

SEQ ID NO: 49877 - DNA, 50 bp, synthetic construct
  source 1..50: mol_type = other DNA
ggattgcgatgctatcacccactcttgggttactattagtatcgcatata

SEQ ID NO: 49878 - DNA, 50 bp, synthetic construct
  source 1..50: mol_type = other DNA
atgacctcatcatcggatataacaattgctgcggtcggtgacgcactcat

SEQ ID NO: 49879 - DNA, 50 bp, synthetic construct
  source 1..50: mol_type = other DNA
tagtacgccgatgacggggcgatatttcctcttccgtcagatgcctcgtg

SEQ ID NO: 49880 - DNA, 50 bp, synthetic construct
  source 1..50: mol_type = other DNA
caccgtagaaagtggatgattatcatgatgtctttgcggcgatgccggta

SEQ ID NO: 49881 - DNA, 50 bp, synthetic construct
  source 1..50: mol_type = other DNA
ccagtcgcaacaccctgcccacggcgaaacactctgggagttgcaggaat

SEQ ID NO: 49882 - DNA, 50 bp, synthetic construct
  source 1..50: mol_type = other DNA
gctgaacgggcgaggaaacgtaagatatttgacttgctcaccatttaaga

SEQ ID NO: 49883 - DNA, 50 bp, synthetic construct
  source 1..50: mol_type = other DNA
ttttgtgtataaatacatgaagcggtggcctcatgtttatatacacaaat

SEQ ID NO: 49884 - DNA, 50 bp, synthetic construct
  source 1..50: mol_type = other DNA
agtttaaactttctccctgtgggtgcgccctcgcttgcaatcggcgaatg

SEQ ID NO: 49885 - DNA, 50 bp, synthetic construct
  source 1..50: mol_type = other DNA
catatttcgtttacaatagtaaacttatatactttataaaacgctatatt

SEQ ID NO: 49886 - DNA, 50 bp, synthetic construct
  source 1..50: mol_type = other DNA
ataaggtaaatgttgccaacaatagtaatagtcggtagcatttacctttc

SEQ ID NO: 49887 - DNA, 50 bp, synthetic construct
  source 1..50: mol_type = other DNA
ggggattttaccaaagtttagggaattcccaaaatacaaaaaaattcacc

SEQ ID NO: 49888 - DNA, 50 bp, synthetic construct
  source 1..50: mol_type = other DNA
cggggttattccagacaatctataagaatttgataactggaatcacccca

SEQ ID NO: 49889 - DNA, 50 bp, synthetic construct
  source 1..50: mol_type = other DNA
aaccgatttctcggttcccgctttcgattatgggaactgggagctgatat

SEQ ID NO: 49890 - DNA, 50 bp, synthetic construct
  source 1..50: mol_type = other DNA
tctcatttttgtatcactatcgtaatgagaatagtagctaaaaaatcctt

SEQ ID NO: 49891 - DNA, 50 bp, synthetic construct
  source 1..50: mol_type = other DNA
atatgtcattagtagtttattgacatgtcaatagactactatcgctgtaa

SEQ ID NO: 49892 - DNA, 50 bp, synthetic construct
  source 1..50: mol_type = other DNA
gctggggaaatggtacatagaacgttgctgctttgcaatatttacctagc

SEQ ID NO: 49893 - DNA, 50 bp, synthetic construct
  source 1..50: mol_type = other DNA
cttccacttacctgcaagtaacattaatgtaactcgcaaaaatcacaact

SEQ ID NO: 49894 - DNA, 50 bp, synthetic construct
  source 1..50: mol_type = other DNA
ccggtgccgccggcctgtaccgacgggtcggggtgtcaagggggtgccgg

SEQ ID NO: 49895 - DNA, 50 bp, synthetic construct
  source 1..50: mol_type = other DNA
tctaaagttatgtcataatcggtacattaagcacacaacacaaaaataga

SEQ ID NO: 49896 - DNA, 50 bp, synthetic construct
  source 1..50: mol_type = other DNA
tgtaaaggttgtgtattaaagcgtttacatagtattacacaaccattcta

SEQ ID NO: 49897 - DNA, 50 bp, synthetic construct
  source 1..50: mol_type = other DNA
aaatatcgagtagtgttattgacatatgttaatatcactactatatgaat

SEQ ID NO: 49898 - DNA, 50 bp, synthetic construct
  source 1..50: mol_type = other DNA
agaggctccattttattcctgttaattaacaggaataaaaaatgttaaga

SEQ ID NO: 49899 - DNA, 50 bp, synthetic construct
  source 1..50: mol_type = other DNA
gggtggggatattgacaagcgtacaagtatttatgttataatccccatca

SEQ ID NO: 49900 - DNA, 50 bp, synthetic construct
  source 1..50: mol_type = other DNA
agatactatttcccagttcccataattacgggaaccgagaaatcggttcc

SEQ ID NO: 49901 - DNA, 50 bp, synthetic construct
  source 1..50: mol_type = other DNA
ttttttaaaaaaagacttgtcttttataagaaacagctttatgaagggaa

SEQ ID NO: 49902 - DNA, 50 bp, synthetic construct
  source 1..50: mol_type = other DNA
ggaaccgatttctcggttcccgtaattatgggaactgggaaataatatat

SEQ ID NO: 49903 - DNA, 50 bp, synthetic construct
  source 1..50: mol_type = other DNA
gcaagttatcactatacattagacagagcaaatgtacagtgcataactac

SEQ ID NO: 49904 - DNA, 50 bp, synthetic construct
  source 1..50: mol_type = other DNA
ttatgtcataaccgatacaatactttagttatgttttcttaaagacaaaa

SEQ ID NO: 49905 - DNA, 50 bp, synthetic construct
  source 1..50: mol_type = other DNA
aatgtaagttttcactatacattagaaaatgtacagtgcataactacaaa

SEQ ID NO: 49906 - DNA, 50 bp, synthetic construct
  source 1..50: mol_type = other DNA
ggatatatgctactactttcatttatcggtgaaaaaagaagacctcaaaa

SEQ ID NO: 49907 - DNA, 50 bp, synthetic construct
  source 1..50: mol_type = other DNA
gtctttgtagtagatattttgcctttgtatataatctctattacatgtaa

SEQ ID NO: 49908 - DNA, 50 bp, synthetic construct
  source 1..50: mol_type = other DNA
gagttatgtcataaccgatacaataccttgattgtgttttcataaagaca

SEQ ID NO: 49909 - DNA, 50 bp, synthetic construct
  source 1..50: mol_type = other DNA
aaaaggtaaatattgacaacaacagtgcttgttggttatattaacctttc

SEQ ID NO: 49910 - DNA, 50 bp, synthetic construct
  source 1..50: mol_type = other DNA
ggattgcgatgctatcacccactcttgggtttctattagtatcgcaccta

SEQ ID NO: 49911 - DNA, 50 bp, synthetic construct
  source 1..50: mol_type = other DNA
aactcaaactcccagttcccatattcaaagattaaaccgctgtttttaca

SEQ ID NO: 49912 - DNA, 50 bp, synthetic construct
  source 1..50: mol_type = other DNA
gcaaactttaaaaaggttgtgtattattacacaaccattttaaatgagca

SEQ ID NO: 49913 - DNA, 50 bp, synthetic construct
  source 1..50: mol_type = other DNA
atagtagtgttattgacacaagtttaaacatatgttaatatcactactca

SEQ ID NO: 49914 - DNA, 50 bp, synthetic construct
  source 1..50: mol_type = other DNA
aaatcacccaactcccccgaaggaaaacttccacgggagtttcattgatt

SEQ ID NO: 49915 - DNA, 50 bp, synthetic construct
  source 1..50: mol_type = other DNA
tgagtagtgatattaacatatgtttaaacttgtgtcaataacactactat

SEQ ID NO: 49916 - DNA, 50 bp, synthetic construct
  source 1..50: mol_type = other DNA
tctgtagttatgcactgtacattttctaatgtatagtgataacttgcatt

SEQ ID NO: 49917 - DNA, 50 bp, synthetic construct
  source 1..50: mol_type = other DNA
ttagtacattgtgtgtcaacacttaccaatcctgccacactatacactaa

SEQ ID NO: 49918 - DNA, 50 bp, synthetic construct
  source 1..50: mol_type = other DNA
tgcatttgctctcagtccaatggatgtctaatgtatagtgataacttgca

SEQ ID NO: 49919 - DNA, 50 bp, synthetic construct
  source 1..50: mol_type = other DNA
ggtgaatttttttgtattttgggaattccctaaactttggtaaaatcccc

SEQ ID NO: 49920 - DNA, 50 bp, synthetic construct
  source 1..50: mol_type = other DNA
aaaaggtaaataataccaacaagagtaactaacggcaatattaacctttt

SEQ ID NO: 49921 - DNA, 50 bp, synthetic construct
  source 1..50: mol_type = other DNA
tattcgtcccatgtagcccgccacatctctccgccactttgtgatgaaaa

SEQ ID NO: 49922 - DNA, 50 bp, synthetic construct
  source 1..50: mol_type = other DNA
tagtaaacacaaatgtagcttatcatgtttaacaacatttgatttttata

SEQ ID NO: 49923 - DNA, 50 bp, synthetic construct
  source 1..50: mol_type = other DNA
aatctgcaatactgttggtaataaagttattaccaacactatgacatttt

SEQ ID NO: 49924 - DNA, 50 bp, synthetic construct
  source 1..50: mol_type = other DNA
actattgcaacgcgctaaacagttaaaattatatagcgcgttgcaatagt

SEQ ID NO: 49925 - DNA, 50 bp, synthetic construct
  source 1..50: mol_type = other DNA
agcggcgcttttaacagtcctatggagattgaacaatactaagagccgct

SEQ ID NO: 49926 - DNA, 50 bp, synthetic construct
  source 1..50: mol_type = other DNA
gcaaactttaaaaaggttgtgtattattacacaaccattttaaacgagca

SEQ ID NO: 49927 - DNA, 50 bp, synthetic construct
  source 1..50: mol_type = other DNA
tgtctttatgaaaacacaatcaaggtattgtatcggttatgacataactc

SEQ ID NO: 49928 - DNA, 50 bp, synthetic construct
  source 1..50: mol_type = other DNA
tattaataggtcttttaggttccaaaggaaaaggaatcttagatataata

SEQ ID NO: 49929 - DNA, 50 bp, synthetic construct
  source 1..50: mol_type = other DNA
cgaagaaagttaattatttttggtttgccaataaaaaacagtttccttcg

SEQ ID NO: 49930 - DNA, 50 bp, synthetic construct
  source 1..50: mol_type = other DNA
aagggcggattctagagttatgtcatgttttcttaaaggcataactaatt

SEQ ID NO: 49931 - DNA, 50 bp, synthetic construct
  source 1..50: mol_type = other DNA
ctatttgaaatctccaaacaggcgcagactgattaggggatttagaaata

SEQ ID NO: 49932 - DNA, 50 bp, synthetic construct
  source 1..50: mol_type = other DNA
aaatagttatgtcgttaagaaaacttgtatcggttatgacataactctag

SEQ ID NO: 49933 - DNA, 50 bp, synthetic construct
  source 1..50: mol_type = other DNA
cagattataagtgcatcataatctgttcattgcaatgcactatcttggcg

SEQ ID NO: 49934 - DNA, 50 bp, synthetic construct
  source 1..50: mol_type = other DNA
actctcccgaagggaattgttttttacataactaatttcttcgggagatg

SEQ ID NO: 49935 - DNA, 50 bp, synthetic construct
  source 1..50: mol_type = other DNA
aaccgaattctcggttcccgttttcgagtatgggaactggaatctggtag

SEQ ID NO: 49936 - DNA, 50 bp, synthetic construct
  source 1..50: mol_type = other DNA
aatactagatactggccatgcaaaattgaaagtgcattaaatgcaacatt

SEQ ID NO: 49937 - DNA, 50 bp, synthetic construct
  source 1..50: mol_type = other DNA
acccatctctgtagttatgcactgtatagtgataacttgcattttatggt

SEQ ID NO: 49938 - DNA, 50 bp, synthetic construct
  source 1..50: mol_type = other DNA
ataaggtaaatgttgccaataatagtaatagtcggtagcatttacctttc

SEQ ID NO: 49939 - DNA, 50 bp, synthetic construct
  source 1..50: mol_type = other DNA
accataaaccgtaagttatcactatacagtgcataactacaaagacgggt

SEQ ID NO: 49940 - DNA, 50 bp, synthetic construct
  source 1..50: mol_type = other DNA
ttatgtcataaccgatacaataccttagttaggtttccttaaaggcataa

SEQ ID NO: 49941 - DNA, 50 bp, synthetic construct
  source 1..50: mol_type = other DNA
gagatagatgcctcatgtaccatatggatagtgtatgatgattctgtctt

SEQ ID NO: 49942 - DNA, 50 bp, synthetic construct
  source 1..50: mol_type = other DNA
taaaacgacttgttgtgttaaaatattgctgtttacttctggtcgttttc

SEQ ID NO: 49943 - DNA, 50 bp, synthetic construct
  source 1..50: mol_type = other DNA
ataatgaataattcaacatcaatgaaaattgtataataataatacaatag

SEQ ID NO: 49944 - DNA, 50 bp, synthetic construct
  source 1..50: mol_type = other DNA
catgttaaaattagacatggtgtgtacacatagtctcatacgttaccacc

SEQ ID NO: 49945 - DNA, 50 bp, synthetic construct
  source 1..50: mol_type = other DNA
ttataattttatagacaatgattcttgatattttgtctataaaataaaag

SEQ ID NO: 49946 - DNA, 50 bp, synthetic construct
  source 1..50: mol_type = other DNA
gagttatgtcataaccgatacaataccttagttaggttttcttaaagaca

SEQ ID NO: 49947 - DNA, 50 bp, synthetic construct
  source 1..50: mol_type = other DNA
aatagtgttggtaaaggaggtttcatgtataaaccattaccaacagtata

SEQ ID NO: 49948 - DNA, 50 bp, synthetic construct
  source 1..50: mol_type = other DNA
tgcaagttacattataaatttacgctgtgtagcgtcaaaagtaactttca

SEQ ID NO: 49949 - DNA, 50 bp, synthetic construct
  source 1..50: mol_type = other DNA
aatttgcacacctacgcctacagctcacttaaagaatatgtgtgcacatt

SEQ ID NO: 49950 - DNA, 50 bp, synthetic construct
  source 1..50: mol_type = other DNA
gatccatttagtagtgatattaacatgtcaataacactactcgatatttt

SEQ ID NO: 49951 - DNA, 50 bp, synthetic construct
  source 1..50: mol_type = other DNA
tataaaaatcaaatgttgttaaacatgataagctacatttgtgtttacta

SEQ ID NO: 49952 - DNA, 50 bp, synthetic construct
  source 1..50: mol_type = other DNA
aatcacccaactctcccgaaggaaactttcttcgggaaagatcacaaatt

SEQ ID NO: 49953 - DNA, 50 bp, synthetic construct
  source 1..50: mol_type = other DNA
ataaggttaatattgccgtcaattacaggtgttggtattatttaccttaa

SEQ ID NO: 49954 - DNA, 50 bp, synthetic construct
  source 1..50: mol_type = other DNA
taaccgatacaataccttgaccacataaagacacaactcaaaggtgagat

SEQ ID NO: 49955 - DNA, 50 bp, synthetic construct
  source 1..50: mol_type = other DNA
tatatttatatatttttaccaataaagctatctttgcatatatttatata

SEQ ID NO: 49956 - DNA, 50 bp, synthetic construct
  source 1..50: mol_type = other DNA
gggtatagcttaaagaaagtttccaggatacttaacaacaagctaattgg

SEQ ID NO: 49957 - DNA, 50 bp, synthetic construct
  source 1..50: mol_type = other DNA
caagcagttatgtcagaaagcacctttttgcttttattgattaaattttc

SEQ ID NO: 49958 - DNA, 50 bp, synthetic construct
  source 1..50: mol_type = other DNA
cgaaggaaactgttttttattggcaaactaaaaacaatcaaatttcttcg

SEQ ID NO: 49959 - DNA, 50 bp, synthetic construct
  source 1..50: mol_type = other DNA
aatcacccaactctcctgaaggaaactttcttcgggaaagatcacaaatt

SEQ ID NO: 49960 - DNA, 50 bp, synthetic construct
  source 1..50: mol_type = other DNA
tagtaaacacaaatgtagcttaacatgtttaacaacatttgatttttata

SEQ ID NO: 49961 - DNA, 50 bp, synthetic construct
  source 1..50: mol_type = other DNA
ttatgtcataaccgatacaataccttagttatgttttcttaaagacaaaa

SEQ ID NO: 49962 - DNA, 50 bp, synthetic construct
  source 1..50: mol_type = other DNA
ttcctgtaaactttacatagtatagtaaagctatgtatgattaacaggaa

SEQ ID NO: 49963 - DNA, 50 bp, synthetic construct
  source 1..50: mol_type = other DNA
tgtctttatgaaaacctaattaaggtattgtataggttatgacataactc

SEQ ID NO: 49964 - DNA, 50 bp, synthetic construct
  source 1..50: mol_type = other DNA
agttggggttatttgaggtacaacttgttgtagcttgaatctccccaact

SEQ ID NO: 49965 - DNA, 50 bp, synthetic construct
  source 1..50: mol_type = other DNA
ttatgtctttaagaaaacctaactaaggtattgtatcggttatgacataa

SEQ ID NO: 49966 - DNA, 50 bp, synthetic construct
  source 1..50: mol_type = other DNA
acgagtttactacgtaaaacgatttatagtaatataggtagtgaactcat

SEQ ID NO: 49967 - DNA, 50 bp, synthetic construct
  source 1..50: mol_type = other DNA
tgctgtactattacaaactcttcattagtcggcagatcaatagtatcgca

SEQ ID NO: 49968 - DNA, 50 bp, synthetic construct
  source 1..50: mol_type = other DNA
aaacaatcataaatgtagcttatcatgatagacgacattaaaaatagttt

SEQ ID NO: 49969 - DNA, 50 bp, synthetic construct
  source 1..50: mol_type = other DNA
catgcaattgattctcatttaaagatcgctgaactggattatctggcatc

SEQ ID NO: 49970 - DNA, 50 bp, synthetic construct
  source 1..50: mol_type = other DNA
tgtatcaaaatgaacgtctaagtatccactaggacgctcattttgataca

SEQ ID NO: 49971 - DNA, 50 bp, synthetic construct
  source 1..50: mol_type = other DNA
tcgccgaatagctcaaatacaatgacccttgaatgtaggctattcggggt

SEQ ID NO: 49972 - DNA, 50 bp, synthetic construct
  source 1..50: mol_type = other DNA
aaaaccgcatcatttatgatatgcttacttatgataacttcccctaatta

SEQ ID NO: 49973 - DNA, 50 bp, synthetic construct
  source 1..50: mol_type = other DNA
aaggatgtgtttgtttcgactgtatgcataggtgcaattgacacatcctg

SEQ ID NO: 49974 - DNA, 50 bp, synthetic construct
  source 1..50: mol_type = other DNA
aggtagacgcttaggaattggtattgttaccaaagcgggtaggtgtacca

SEQ ID NO: 49975 - DNA, 50 bp, synthetic construct
  source 1..50: mol_type = other DNA
aggctcagggcaaagcccttgcgcccggcgtgcggctttttcctgttcgt

SEQ ID NO: 49976 - DNA, 50 bp, synthetic construct
  source 1..50: mol_type = other DNA
tgttgtcaccatgttggagtcaacctaattacaccaacaaggtgacgaca

SEQ ID NO: 49977 - DNA, 50 bp, synthetic construct
  source 1..50: mol_type = other DNA
cggttacatccctgctaattaaaccagtacaacacttcatcatgtaccca

SEQ ID NO: 49978 - DNA, 50 bp, synthetic construct
  source 1..50: mol_type = other DNA
ctgtacgggtgattcggtctaagctttgataaaaaaaagcaccccttggg

SEQ ID NO: 49979 - DNA, 50 bp, synthetic construct
  source 1..50: mol_type = other DNA
cgtataggtatggtatcactcgggtgcccgagtgatactcaatgtatagc

SEQ ID NO: 49980 - DNA, 50 bp, synthetic construct
  source 1..50: mol_type = other DNA
tgttagcaacacacattactccaacattaaattgctgtgttctgccaagc

SEQ ID NO: 49981 - DNA, 50 bp, synthetic construct
  source 1..50: mol_type = other DNA
tttggtatctcgtttattcttcttccaacgagaggaaacgaggaactaaa

SEQ ID NO: 49982 - DNA, 50 bp, synthetic construct
  source 1..50: mol_type = other DNA
cgggcgtaggcggcgacgtgcacggcggcgcacgtcgccggcgacggccg

SEQ ID NO: 49983 - DNA, 50 bp, synthetic construct
  source 1..50: mol_type = other DNA
gtgatggcggccatcgcggatctcgccagatccgcgatccctatcaacac

SEQ ID NO: 49984 - DNA, 50 bp, synthetic construct
  source 1..50: mol_type = other DNA
aaacttttcattatcagaatatttttcaatattatgaaaggagaaagtga

SEQ ID NO: 49985 - DNA, 50 bp, synthetic construct
  source 1..50: mol_type = other DNA
ggctcaagcggcttttatcattttcgaaaatgataagtaggcgtttgcgt

SEQ ID NO: 49986 - DNA, 50 bp, synthetic construct
  source 1..50: mol_type = other DNA
ggtttcgttagggtgccccaaggcgcgccgcgccgatcaggccggcaacc

SEQ ID NO: 49987 - DNA, 50 bp, synthetic construct
  source 1..50: mol_type = other DNA
gaatacactgcatccatcgactgcaagcaggcgaccgacaagctctatgc

SEQ ID NO: 49988 - DNA, 50 bp, synthetic construct
  source 1..50: mol_type = other DNA
tagagtaattcgttgttaatcatcaccatgatataatgctttttactgtt

SEQ ID NO: 49989 - DNA, 50 bp, synthetic construct
  source 1..50: mol_type = other DNA
ttttgtcaaaatgaaactgttcttcaggtaatagtatcattttacaaaag

SEQ ID NO: 49990 - DNA, 50 bp, synthetic construct
  source 1..50: mol_type = other DNA
cgttatgtagcaactaaatttcgcgagggatatgtagttgctatgtatca

SEQ ID NO: 49991 - DNA, 50 bp, synthetic construct
  source 1..50: mol_type = other DNA
cagaaacctttggcaatgttcatttgaatgagcttagcaaaagcaattac

SEQ ID NO: 49992 - DNA, 50 bp, synthetic construct
  source 1..50: mol_type = other DNA
aattttgtgaatgtaatatatttcctgcacctagaggcatcatgaaagtt

SEQ ID NO: 49993 - DNA, 50 bp, synthetic construct
  source 1..50: mol_type = other DNA
attgaacggttgcggcattttggattccctaatatcatacacccatcaac

SEQ ID NO: 49994 - DNA, 50 bp, synthetic construct
  source 1..50: mol_type = other DNA
tttagttcctcgtttcctctcgttggaagaagaataaacgagataccaaa

SEQ ID NO: 49995 - DNA, 50 bp, synthetic construct
  source 1..50: mol_type = other DNA
cggtgtcaaattgaccaaaatcccaaagtcctttggtcaatttgacacct

SEQ ID NO: 49996 - DNA, 50 bp, synthetic construct
  source 1..50: mol_type = other DNA
ttttcaggggctatgaagcccctttttatggtaaaatactctctgtaatg

SEQ ID NO: 49997 - DNA, 50 bp, synthetic construct
  source 1..50: mol_type = other DNA
taatacgcagaaattcttttcgggttgccgaaagaaatttctaccacata

SEQ ID NO: 49998 - DNA, 50 bp, synthetic construct
  source 1..50: mol_type = other DNA
gtgcttatattatacctgaagtgaattcagacataatatactatacgtta

SEQ ID NO: 49999 - DNA, 50 bp, synthetic construct
  source 1..50: mol_type = other DNA
aggtgaacatctaaataaaaccgaattcggcattgtagcattagccataa

SEQ ID NO: 50000 - DNA, 50 bp, synthetic construct
  source 1..50: mol_type = other DNA
gcaaaaatagagtttaaagacggaagttcatctttaaatgataatcaatt

SEQ ID NO: 50001 - DNA, 50 bp, synthetic construct
  source 1..50: mol_type = other DNA
acatagaaattaatactacacatagctgtgtgttgctaaaaaataaaatt

SEQ ID NO: 50002 - DNA, 50 bp, synthetic construct
  source 1..50: mol_type = other DNA
tgttgtttttttattcatactggacatgctgtgtgaataaaaagacaact

SEQ ID NO: 50003 - DNA, 50 bp, synthetic construct
  source 1..50: mol_type = other DNA
agtaaaaatctccgttatttatggtatctgtattaagtgaggttttaaaa

SEQ ID NO: 50004 - DNA, 50 bp, synthetic construct
  source 1..50: mol_type = other DNA
atcgtccatttatatatccaattctaaggttctccgtatcaatattaagt

SEQ ID NO: 50005 - DNA, 50 bp, synthetic construct
  source 1..50: mol_type = other DNA
aaattacatattttcattataatttaaatagttatgaaattattatattt

SEQ ID NO: 50006 - DNA, 50 bp, synthetic construct
  source 1..50: mol_type = other DNA
aaactaatttcattacatacaacatatgttgtatgtaattggattgaagc

SEQ ID NO: 50007 - DNA, 50 bp, synthetic construct
  source 1..50: mol_type = other DNA
gtaatttattttactataatttgaatttaaattatagtaaaatattaaac

SEQ ID NO: 50008 - DNA, 50 bp, synthetic construct
  source 1..50: mol_type = other DNA
aatcaaacacttttgggttgcaaaattttgataaccaattcccatctgcg

SEQ ID NO: 50009 - DNA, 50 bp, synthetic construct
  source 1..50: mol_type = other DNA
tggttctatttttttactctttgttgatataaagtaaaatattatatcct

SEQ ID NO: 50010 - DNA, 50 bp, synthetic construct
  source 1..50: mol_type = other DNA
aaaagttgtctttttattcacacaacagtatgaataaaaaaacaacaata

SEQ ID NO: 50011 - DNA, 50 bp, synthetic construct
  source 1..50: mol_type = other DNA
ctaatttcattacatacaacatattaatatattgtatgtaattagattga

SEQ ID NO: 50012 - DNA, 50 bp, synthetic construct
  source 1..50: mol_type = other DNA
tacatacaacatattgaatgtaatgaaatatatctagtatgttatatgta

SEQ ID NO: 50013 - DNA, 50 bp, synthetic construct
  source 1..50: mol_type = other DNA
tccaaaattagtaaaaacctcatttaagtgaggtttttaatagtaaaact

SEQ ID NO: 50014 - DNA, 50 bp, synthetic construct
  source 1..50: mol_type = other DNA
ctgaagaaaactcacttaaacctaataggtcttaattatttaacattctt

SEQ ID NO: 50015 - DNA, 50 bp, synthetic construct
  source 1..50: mol_type = other DNA
agtaaactattaaatcacttacttttacaagagtaatatttgtatttaag

SEQ ID NO: 50016 - DNA, 50 bp, synthetic construct
  source 1..50: mol_type = other DNA
tccaattttagtaaaaacctccgttaagtgaggtttttaatagtaaaact

SEQ ID NO: 50017 - DNA, 50 bp, synthetic construct
  source 1..50: mol_type = other DNA
agttgtctttttattcacacagcatgtacagtgtgaataaaagaacaaca

SEQ ID NO: 50018 - DNA, 50 bp, synthetic construct
  source 1..50: mol_type = other DNA
tttccctttatgtggttcttatgctaatcgtgtcgcagactttaggagaa

SEQ ID NO: 50019 - DNA, 50 bp, synthetic construct
  source 1..50: mol_type = other DNA
tctgcgtttaattattacagtaatttattactgttgtgatcttaggaaaa

SEQ ID NO: 50020 - DNA, 50 bp, synthetic construct
  source 1..50: mol_type = other DNA
gcttaaatataaatgttactcttgtacaaaagtaactatttaaatagttt

SEQ ID NO: 50021 - DNA, 50 bp, synthetic construct
  source 1..50: mol_type = other DNA
atcgtccatttatatatccaattctaaggttctccgtatcagtattaagt

SEQ ID NO: 50022 - DNA, 50 bp, synthetic construct
  source 1..50: mol_type = other DNA
taaaaacctccgttatttatggtacgtatcagtattaagtgaggtttttt

SEQ ID NO: 50023 - DNA, 50 bp, synthetic construct
  source 1..50: mol_type = other DNA
atgaaagaagtttttaatgtccatattcaaaatttaatagaggcttttta

SEQ ID NO: 50024 - DNA, 50 bp, synthetic construct
  source 1..50: mol_type = other DNA
taatcagatttttattgtgtttttaaaaaaacttactaaatttctgatta

SEQ ID NO: 50025 - DNA, 50 bp, synthetic construct
  source 1..50: mol_type = other DNA
gcgtccatgtagagttctttacacttttgtcaagtgcttttttgagttat

SEQ ID NO: 50026 - DNA, 50 bp, synthetic construct
  source 1..50: mol_type = other DNA
atagttcgtctttgtagcaacacacatgtgtcgttactactatcggaaca

SEQ ID NO: 50027 - DNA, 50 bp, synthetic construct
  source 1..50: mol_type = other DNA
ttttactatcttcttttttctgaatattattataccagaagttaaaaaga

SEQ ID NO: 50028 - DNA, 50 bp, synthetic construct
  source 1..50: mol_type = other DNA
caattctcgacttcggccgccactttcatcgcggccgagttgacgaagcg

SEQ ID NO: 50029 - DNA, 50 bp, synthetic construct
  source 1..50: mol_type = other DNA
taatactcagaaattcttttcgggttgccgaaagaaatttctactaccat

SEQ ID NO: 50030 - DNA, 50 bp, synthetic construct
  source 1..50: mol_type = other DNA
tattttgaaagttccgccagtatcgcgaccttggcgaacgcctcgaaatg

SEQ ID NO: 50031 - DNA, 50 bp, synthetic construct
  source 1..50: mol_type = other DNA
tatcgatgaagaaaaagctgaaaaggtttttcactggaactagtaagaaa

SEQ ID NO: 50032 - DNA, 50 bp, synthetic construct
  source 1..50: mol_type = other DNA
accattcaggagatatattctcttgagggaaaatatagtgatgaagttaa

SEQ ID NO: 50033 - DNA, 50 bp, synthetic construct
  source 1..50: mol_type = other DNA
ttgtttgatatcttgcctaacaccacggtgtatagtaacgtatcaaacac

SEQ ID NO: 50034 - DNA, 50 bp, synthetic construct
  source 1..50: mol_type = other DNA
agttgcacttttatagatatagcttctactatagctaaaaaagtgcaact

SEQ ID NO: 50035 - DNA, 50 bp, synthetic construct
  source 1..50: mol_type = other DNA
cgtcgagggtttcatggtggaggcgatacgtgacctttaaaacccaccac

SEQ ID NO: 50036 - DNA, 50 bp, synthetic construct
  source 1..50: mol_type = other DNA
ttttccaaataatcctaacagtaaaattacttttcaaaacaatttttaat

SEQ ID NO: 50037 - DNA, 50 bp, synthetic construct
  source 1..50: mol_type = other DNA
gtgtatggctctttggggtgtggatttttaaccgtgaaacaaccatacaa

SEQ ID NO: 50038 - DNA, 50 bp, synthetic construct
  source 1..50: mol_type = other DNA
aatatgtattctatagtacgctggaagcagcgtaaagcaaaatacatcac

SEQ ID NO: 50039 - DNA, 50 bp, synthetic construct
  source 1..50: mol_type = other DNA
tgagcgaagattaatcagccggatttttcgggcaccctaatgatataaat

SEQ ID NO: 50040 - DNA, 50 bp, synthetic construct
  source 1..50: mol_type = other DNA
ggaaccgatttctcggttcccgtaattatgggaactgggaaataatgtat

SEQ ID NO: 50041 - DNA, 50 bp, synthetic construct
  source 1..50: mol_type = other DNA
agtttggaaaatgatgagcaagttgagacggtagcgttattgtccaaact

SEQ ID NO: 50042 - DNA, 50 bp, synthetic construct
  source 1..50: mol_type = other DNA
tatcgacattaagtttggacaataactacagtctcaacggtattaccaaa

SEQ ID NO: 50043 - DNA, 50 bp, synthetic construct
  source 1..50: mol_type = other DNA
atgagttcactacctatattactataaatcgttttacgtagtaaactcat

SEQ ID NO: 50044 - DNA, 50 bp, synthetic construct
  source 1..50: mol_type = other DNA
ttccctgtaataatcaagttcatgaccctcaattttactattacatggaa

SEQ ID NO: 50045 - DNA, 50 bp, synthetic construct
  source 1..50: mol_type = other DNA
gggtgtcacagccaatcttccgactcgtcgagggatggccaaagacaccc

SEQ ID NO: 50046 - DNA, 50 bp, synthetic construct
  source 1..50: mol_type = other DNA
cctcgcttctcggtaagaagaagttttctacaaaaaaccgactggatcca

SEQ ID NO: 50047 - DNA, 50 bp, synthetic construct
  source 1..50: mol_type = other DNA
atcaagtcaatgtcgaacaataaactgctatctctcgacggatttacgga

SEQ ID NO: 50048 - DNA, 50 bp, synthetic construct
  source 1..50: mol_type = other DNA
gtcgcaattaaaatccaatgatagggagatcattgtttttacaacccgac

SEQ ID NO: 50049 - DNA, 50 bp, synthetic construct
  source 1..50: mol_type = other DNA
tctggttgacggagacatgagaatggattctatatgcttaagcaaattta

SEQ ID NO: 50050 - DNA, 50 bp, synthetic construct
  source 1..50: mol_type = other DNA
taaagcagatgaatctccccccggaagaaacgggagagccggactaaggc

SEQ ID NO: 50051 - DNA, 50 bp, synthetic construct
  source 1..50: mol_type = other DNA
agaaaaactagtgatagttttggtgagctataagaaaaccatgttcgcac

SEQ ID NO: 50052 - DNA, 50 bp, synthetic construct
  source 1..50: mol_type = other DNA
aaaaaggggtgtaatggcttccaaatgtgtggcacattacaccccatgac

SEQ ID NO: 50053 - DNA, 50 bp, synthetic construct
  source 1..50: mol_type = other DNA
agtatagagattcatgccttcgggcaccccaatgaaacaaaccctatact

SEQ ID NO: 50054 - DNA, 50 bp, synthetic construct
  source 1..50: mol_type = other DNA
agtatagatattcattctttcgggcaccctaatgaaacaaaccctatact

SEQ ID NO: 50055 - DNA, 50 bp, synthetic construct
  source 1..50: mol_type = other DNA
cagtgttacatgcgaaaaagctgttcgcaagtattttgtaagtaacaccg

SEQ ID NO: 50056 - DNA, 50 bp, synthetic construct
  source 1..50: mol_type = other DNA
gtgagccttggcgttacaggtattatttaacctgtaagactcattttcac

SEQ ID NO: 50057 - DNA, 50 bp, synthetic construct
  source 1..50: mol_type = other DNA
attcttctgaaaaaatgttgggtgtacaccacgcgtaatttcaggttgat

SEQ ID NO: 50058 - DNA, 50 bp, synthetic construct
  source 1..50: mol_type = other DNA
gaatgcagacgattcctacaggtaaatacctgtaacgccaaggctcacag

SEQ ID NO: 50059 - DNA, 50 bp, synthetic construct
  source 1..50: mol_type = other DNA
cgctatacgaatagcttatgcttgtacaagcatagtcaattcgcatggta

SEQ ID NO: 50060 - DNA, 50 bp, synthetic construct
  source 1..50: mol_type = other DNA
ataactccaagaatgtttcgtcaaaaaccgccgtattttctctccgttat

SEQ ID NO: 50061 - DNA, 50 bp, synthetic construct
  source 1..50: mol_type = other DNA
aacttccgggcgtttttttatttccattattaaaaatgttagcggaagaa

SEQ ID NO: 50062 - DNA, 50 bp, synthetic construct
  source 1..50: mol_type = other DNA
tgtcgtcaccttgttggtgtaattaggttgacgccaacaggatgacaaca

SEQ ID NO: 50063 - DNA, 50 bp, synthetic construct
  source 1..50: mol_type = other DNA
tgtcgtcaccttgttggtgtaattaggttgacaccaagaggatgacgaca

SEQ ID NO: 50064 - DNA, 50 bp, synthetic construct
  source 1..50: mol_type = other DNA
ataagactataagcatactctgcctgaaacgagttcacttattagattat

SEQ ID NO: 50065 - DNA, 50 bp, synthetic construct
  source 1..50: mol_type = other DNA
tcttcaaaggagccctcatgtatattaattttaactgcttcctcttcatt

SEQ ID NO: 50066 - DNA, 50 bp, synthetic construct
  source 1..50: mol_type = other DNA
agttttttgttgtttctataattgttgagctatggaaacaacaacgagaa

SEQ ID NO: 50067 - DNA, 50 bp, synthetic construct
  source 1..50: mol_type = other DNA
gatatacattgagcatcactcgggcacccgagtgataccatacctatacg

SEQ ID NO: 50068 - DNA, 50 bp, synthetic construct
  source 1..50: mol_type = other DNA
ttgtgggaaagcattacaaccgtctcgttactactatcggaacacatttt

SEQ ID NO: 50069 - DNA, 50 bp, synthetic construct
  source 1..50: mol_type = other DNA
agttgcacttttatacaccttgcttctgctatagctaaaaaagtgcaact

SEQ ID NO: 50070 - DNA, 50 bp, synthetic construct
  source 1..50: mol_type = other DNA
acgctccgttggaggtgtaacggtgaaccgtaccacaagtaacggagcgc

SEQ ID NO: 50071 - DNA, 50 bp, synthetic construct
  source 1..50: mol_type = other DNA
taatatccttttgtttgggaaactccagtttcccttagttaaagatatga

SEQ ID NO: 50072 - DNA, 50 bp, synthetic construct
  source 1..50: mol_type = other DNA
tgggtattattcttgcgattcgtctccacgaaaacatattgatagtttag

SEQ ID NO: 50073 - DNA, 50 bp, synthetic construct
  source 1..50: mol_type = other DNA
taatatttttaactaagggaaaccggagtttcccaaacaaaaggatatta

SEQ ID NO: 50074 - DNA, 50 bp, synthetic construct
  source 1..50: mol_type = other DNA
aaagtatcgttatctaacgtcagcttgttgaggtaagataacgatacctt

SEQ ID NO: 50075 - DNA, 50 bp, synthetic construct
  source 1..50: mol_type = other DNA
agccgccacccctgctgcacccgagcagaggaagtgaagatgtcacggca

SEQ ID NO: 50076 - DNA, 50 bp, synthetic construct
  source 1..50: mol_type = other DNA
tatgttccctttgtacaccgttgcaaacatcggtgtacaaggggtacaaa

SEQ ID NO: 50077 - DNA, 50 bp, synthetic construct
  source 1..50: mol_type = other DNA
tccctctaatgatttaactatgaatgtgttgctacaaagacgaactatgt

SEQ ID NO: 50078 - DNA, 50 bp, synthetic construct
  source 1..50: mol_type = other DNA
gataggagtaacgacacattgtgagagactatagtgttgatacaaagaaa

SEQ ID NO: 50079 - DNA, 50 bp, synthetic construct
  source 1..50: mol_type = other DNA
acaaaaatcatcttgacaaactcgtttaataggacaaaaaaattaactgt

SEQ ID NO: 50080 - DNA, 50 bp, synthetic construct
  source 1..50: mol_type = other DNA
tatttttttgtactaacacacacctaataatatattagtacaaaaatatc

SEQ ID NO: 50081 - DNA, 50 bp, synthetic construct
  source 1..50: mol_type = other DNA
aattagatataaaatttttattaattttgactatctttttatatcttctt

SEQ ID NO: 50082 - DNA, 50 bp, synthetic construct
  source 1..50: mol_type = other DNA
tgtgttccgatgttagtctcaacacatgtggagactgtggtgggactaca

SEQ ID NO: 50083 - DNA, 50 bp, synthetic construct
  source 1..50: mol_type = other DNA
gcggcgctgaccgccgaagccgccctggcgagccgcgcgttgtcggccgc

SEQ ID NO: 50084 - DNA, 50 bp, synthetic construct
  source 1..50: mol_type = other DNA
agttgcacttttatataccttgcttctgctatagctaaaaaagtgcaact

SEQ ID NO: 50085 - DNA, 50 bp, synthetic construct
  source 1..50: mol_type = other DNA
atctttaactaagggaaactggacaactggagtttccccaacaaaaggat

SEQ ID NO: 50086 - DNA, 50 bp, synthetic construct
  source 1..50: mol_type = other DNA
gtctccaataattaaaaaaagaatgattacttagttttaggctaagtaat

SEQ ID NO: 50087 - DNA, 50 bp, synthetic construct
  source 1..50: mol_type = other DNA
ctcacttaaaaacttttctataaactttagaaggaggatttttacggtga

SEQ ID NO: 50088 - DNA, 50 bp, synthetic construct
  source 1..50: mol_type = other DNA
tatcagcaattatgtctaatgaattttttacaaaggcataatgccaagtg

SEQ ID NO: 50089 - DNA, 50 bp, synthetic construct
  source 1..50: mol_type = other DNA
caaagaacgacctgtagcagtgactgccgtatgacagtgtacgtgcgatg

SEQ ID NO: 50090 - DNA, 50 bp, synthetic construct
  source 1..50: mol_type = other DNA
gtttagatggttaaaaaacagcagacatgctgcccagcggcagtccaaac

SEQ ID NO: 50091 - DNA, 50 bp, synthetic construct
  source 1..50: mol_type = other DNA
agttgcacttttttagctatagcagaagcaaggtgtataaaagtgcaact

SEQ ID NO: 50092 - DNA, 50 bp, synthetic construct
  source 1..50: mol_type = other DNA
ccgggttctatccaaactgggtcagctttcccggttggagtggaatcagg

SEQ ID NO: 50093 - DNA, 50 bp, synthetic construct
  source 1..50: mol_type = other DNA
aaacgatacgctgaagcatatcataagtaatgaggttcatgatttttgac

SEQ ID NO: 50094 - DNA, 50 bp, synthetic construct
  source 1..50: mol_type = other DNA
gttctccacgaaaagaagtataccaccattaacttattttagtggagatc

SEQ ID NO: 50095 - DNA, 50 bp, synthetic construct
  source 1..50: mol_type = other DNA
tacggcatttcccccaagaactgcgagctgtttttattgaatgtgccaca

SEQ ID NO: 50096 - DNA, 50 bp, synthetic construct
  source 1..50: mol_type = other DNA
cagatttttattgtgtttttttatataaaaacttactaaatttctgatta

SEQ ID NO: 50097 - DNA, 50 bp, synthetic construct
  source 1..50: mol_type = other DNA
aatcaaacacttttgggttgcaaaattttgataaccaattcccatctgca

SEQ ID NO: 50098 - DNA, 50 bp, synthetic construct
  source 1..50: mol_type = other DNA
agttgcacttttttagctatagtagatgctatatctataaaagtgcaact

SEQ ID NO: 50099 - DNA, 50 bp, synthetic construct
  source 1..50: mol_type = other DNA
agatttttagtatgttttttaaattaatcatttttttaatataaaaactt

SEQ ID NO: 50100 - DNA, 50 bp, synthetic construct
  source 1..50: mol_type = other DNA
gatttataggaggaaatagaagaaattatttgcctgatttcatgtatgtc

SEQ ID NO: 50101 - DNA, 50 bp, synthetic construct
  source 1..50: mol_type = other DNA
gatagtagtaacgacacattgtgagagacttgtgtgttgctacaaagaca

SEQ ID NO: 50102 - DNA, 50 bp, synthetic construct
  source 1..50: mol_type = other DNA
caatatctttaactaagggaaaccggggtatcacttagataaagatacca

SEQ ID NO: 50103 - DNA, 50 bp, synthetic construct
  source 1..50: mol_type = other DNA
taccatccttatcaaagccttgctaatgtgagggtttggtaaggatgttt

SEQ ID NO: 50104 - DNA, 50 bp, synthetic construct
  source 1..50: mol_type = other DNA
gatatgagtgttaaggtaagaatacttttacatagctaaacacgtatgag

SEQ ID NO: 50105 - DNA, 50 bp, synthetic construct
  source 1..50: mol_type = other DNA
accatctgaaataataggtgtatttaaatacaccatctaaaacgatacaa

SEQ ID NO: 50106 - DNA, 50 bp, synthetic construct
  source 1..50: mol_type = other DNA
agtttttcttttgtatcaacacaatactatcggaacacattttatcaacc

SEQ ID NO: 50107 - DNA, 50 bp, synthetic construct
  source 1..50: mol_type = other DNA
agtttggacaatgatgagcaagttgagacggtagcattattgtccaaact

SEQ ID NO: 50108 - DNA, 50 bp, synthetic construct
  source 1..50: mol_type = other DNA
agtttggacaataaacataccgtctcgttactactatcggaacacatttt

SEQ ID NO: 50109 - DNA, 50 bp, synthetic construct
  source 1..50: mol_type = other DNA
atttttgtgggacaaaagtacgcacggtattaccaaagacccacaaagct

SEQ ID NO: 50110 - DNA, 50 bp, synthetic construct
  source 1..50: mol_type = other DNA
cttcatcgtccatttgcggctcgccggcgcgcgacgagacgaagagcggg

SEQ ID NO: 50111 - DNA, 50 bp, synthetic construct
  source 1..50: mol_type = other DNA
atctttatctaagtgaaaccccagttgtccggtatcacatagttaaagat

SEQ ID NO: 50112 - DNA, 50 bp, synthetic construct
  source 1..50: mol_type = other DNA
attaccactccaaactgttcaacatcagtcgaacagtttcaagtggtcaa

SEQ ID NO: 50113 - DNA, 50 bp, synthetic construct
  source 1..50: mol_type = other DNA
cgtctttgtagcaacacacaagtctccacatgtgtcggcactattatcgg

SEQ ID NO: 50114 - DNA, 50 bp, synthetic construct
  source 1..50: mol_type = other DNA
aaggagaataccatgagtgttaaggcttttacatagctaaacacgtacct

SEQ ID NO: 50115 - DNA, 50 bp, synthetic construct
  source 1..50: mol_type = other DNA
attattttacatatgaaacaatactgatattgttacttaatagcaaagga

SEQ ID NO: 50116 - DNA, 50 bp, synthetic construct
  source 1..50: mol_type = other DNA
atattgattttatttgcactaataaactaacgcccgggtaatcgcaacac

SEQ ID NO: 50117 - DNA, 50 bp, synthetic construct
  source 1..50: mol_type = other DNA
agggtgttttaggaagtgaaaatcataatcttcactttcttatgcaccct

SEQ ID NO: 50118 - DNA, 50 bp, synthetic construct
  source 1..50: mol_type = other DNA
ttgtatcgctttagatggtgtatttaaatacactatgaggtagattaggg

SEQ ID NO: 50119 - DNA, 50 bp, synthetic construct
  source 1..50: mol_type = other DNA
atccttttgtttgggaaactccagttgtccgctttcccttagttaaagat

SEQ ID NO: 50120 - DNA, 50 bp, synthetic construct
  source 1..50: mol_type = other DNA
agaaaaaagcggtggggcgcttttaacttctttccccatttcttttttct

SEQ ID NO: 50121 - DNA, 50 bp, synthetic construct
  source 1..50: mol_type = other DNA
taattttttaagttatttactaatcatcaggtgctttacttaaatgattg

SEQ ID NO: 50122 - DNA, 50 bp, synthetic construct
  source 1..50: mol_type = other DNA
aaaattttagttattgggggttgacatgtacccatcaacacgagagaggg

SEQ ID NO: 50123 - DNA, 50 bp, synthetic construct
  source 1..50: mol_type = other DNA
atttgctacaggacatcccatatttacaagaccgatggtctgtagcaata

SEQ ID NO: 50124 - DNA, 50 bp, synthetic construct
  source 1..50: mol_type = other DNA
agattgtatgattaaattgatagcaataaggtaattgatacaataaaata

SEQ ID NO: 50125 - DNA, 50 bp, synthetic construct
  source 1..50: mol_type = other DNA
agtaactgaaataaagaatttcactagtaaaactctttattttcaaaaaa

SEQ ID NO: 50126 - DNA, 50 bp, synthetic construct
  source 1..50: mol_type = other DNA
atccataagagatatattacagttccaactgaccaatactaatggtgtag

SEQ ID NO: 50127 - DNA, 50 bp, synthetic construct
  source 1..50: mol_type = other DNA
ggttcacagagtatttccgtaaagcacctgaaaggtggtctaggtgactt

SEQ ID NO: 50128 - DNA, 50 bp, synthetic construct
  source 1..50: mol_type = other DNA
ataaaaatcacccgattaacgccgcgttttaatcatcgtactgtttcagg

SEQ ID NO: 50129 - DNA, 50 bp, synthetic construct
  source 1..50: mol_type = other DNA
ttgatatggccagttgacaacatatagatgctaccgatgaggaatggaaa

SEQ ID NO: 50130 - DNA, 50 bp, synthetic construct
  source 1..50: mol_type = other DNA
gtagcctctagcgcatgaaactcacgggggctacactcgccccatgacac

SEQ ID NO: 50131 - DNA, 50 bp, synthetic construct
  source 1..50: mol_type = other DNA
aagaaatgacatttgctctatcttcaaatagagattcaaggtctttcgtg

SEQ ID NO: 50132 - DNA, 50 bp, synthetic construct
  source 1..50: mol_type = other DNA
cttcccgaccgttcgacatgatgatatcatcatgcataccaacaaggtga

SEQ ID NO: 50133 - DNA, 50 bp, synthetic construct
  source 1..50: mol_type = other DNA
tcaacttcagaagaacagaatcatatatttttccgtcaattacagttccc

SEQ ID NO: 50134 - DNA, 50 bp, synthetic construct
  source 1..50: mol_type = other DNA
acctacggttttggagaccgttgctcactatacactccaaacggcaaaat

SEQ ID NO: 50135 - DNA, 50 bp, synthetic construct
  source 1..50: mol_type = other DNA
gagcaggatccgtttgcggacatcaaaatgtcggcaagaatattttgctt

SEQ ID NO: 50136 - DNA, 50 bp, synthetic construct
  source 1..50: mol_type = other DNA
atctacaagctgaccaaggatgcgaccgtcagggtctcgagtttgtcccc

SEQ ID NO: 50137 - DNA, 50 bp, synthetic construct
  source 1..50: mol_type = other DNA
gtaatgacgttcgaaaagctctggggacaggttttgcggaaatacagcgt

SEQ ID NO: 50138 - DNA, 50 bp, synthetic construct
  source 1..50: mol_type = other DNA
tctccccgcccgccttcttcccgccgacgcggcgaaggccgcccacgaga

SEQ ID NO: 50139 - DNA, 50 bp, synthetic construct
  source 1..50: mol_type = other DNA
attgagatattaggaaaaacaatgccaagtggtatgtgtgccatatcaat

SEQ ID NO: 50140 - DNA, 50 bp, synthetic construct
  source 1..50: mol_type = other DNA
gctaaacccacaagattgtgcctttcctggcaaagttctactttgtaagt

SEQ ID NO: 50141 - DNA, 50 bp, synthetic construct
  source 1..50: mol_type = other DNA
ctattaagaggcagagaagcagactattctatatctcttcgtcaatctca

SEQ ID NO: 50142 - DNA, 50 bp, synthetic construct
  source 1..50: mol_type = other DNA
gataatggagttgtacatgcaaagtacttgttctgctgctttatcatcta

SEQ ID NO: 50143 - DNA, 50 bp, synthetic construct
  source 1..50: mol_type = other DNA
aatatactatgaattgttacaaaaaattttagaagaaaaagtaggatata

SEQ ID NO: 50144 - DNA, 50 bp, synthetic construct
  source 1..50: mol_type = other DNA
tttatacaacagttaaaaaatataagtcgtctttttgttttggtaataga

SEQ ID NO: 50145 - DNA, 50 bp, synthetic construct
  source 1..50: mol_type = other DNA
atctatgttcaccttcttttaaatcactttaaaataagttagttttatgg

SEQ ID NO: 50146 - DNA, 50 bp, synthetic construct
  source 1..50: mol_type = other DNA
ttattcaaatataggtgggtttcttttgaaaaagacctctgttaatttaa

SEQ ID NO: 50147 - DNA, 50 bp, synthetic construct
  source 1..50: mol_type = other DNA
cattttgtcatgtaatatataaataatgtaatgaattaggaattgaaatc

SEQ ID NO: 50148 - DNA, 50 bp, synthetic construct
  source 1..50: mol_type = other DNA
acctgtaaatccgaaaccaattcgttttcttttattattcattacttata

SEQ ID NO: 50149 - DNA, 50 bp, synthetic construct
  source 1..50: mol_type = other DNA
atttagatactatacggagaaccttaatgaagaacgaaccgtaccataaa

SEQ ID NO: 50150 - DNA, 50 bp, synthetic construct
  source 1..50: mol_type = other DNA
cattgcacttttattaagagtactgatgctctcatcacaaaaatgcgatg

SEQ ID NO: 50151 - DNA, 50 bp, synthetic construct
  source 1..50: mol_type = other DNA
aatcaaacacttttgggttgcaaaattttgataaccaattcccatctgct

SEQ ID NO: 50152 - DNA, 50 bp, synthetic construct
  source 1..50: mol_type = other DNA
atattacatacaacatattgaatgtataattaatatgttgtatgtactat

SEQ ID NO: 50153 - DNA, 50 bp, synthetic construct
  source 1..50: mol_type = other DNA
acttaaatacaaatgttactcttgtacaaaagtaactatttaaatagttt

SEQ ID NO: 50154 - DNA, 50 bp, synthetic construct
  source 1..50: mol_type = other DNA
gacatactcaaatgacatcaattctggtattgatgtcaagggttgaaaat

SEQ ID NO: 50155 - DNA, 50 bp, synthetic construct
  source 1..50: mol_type = other DNA
aaactatttaaatagttacttttgtacaagagtaacatttatatttaagc

SEQ ID NO: 50156 - DNA, 50 bp, synthetic construct
  source 1..50: mol_type = other DNA
ttatatataaacctaaaaggttatatataactaaataggttaataatttc

SEQ ID NO: 50157 - DNA, 50 bp, synthetic construct
  source 1..50: mol_type = other DNA
tttatcttttcttgacatcaacaccagaattgatgtcatttgagtatgtc

SEQ ID NO: 50158 - DNA, 50 bp, synthetic construct
  source 1..50: mol_type = other DNA
tttttccctccatctctgtatcattaatggttcagagtttgattcaataa

SEQ ID NO: 50159 - DNA, 50 bp, synthetic construct
  source 1..50: mol_type = other DNA
aaagaaagcgcgccgaaaagctgtaggcggcggtgcggcgctttttcttt

SEQ ID NO: 50160 - DNA, 50 bp, synthetic construct
  source 1..50: mol_type = other DNA
attgttgtataaattacatcaacgaaacctagtgtgatttagaaaactaa

SEQ ID NO: 50161 - DNA, 50 bp, synthetic construct
  source 1..50: mol_type = other DNA
ttatttttacatatgaaacaacactgatattgttacttaatagcaaagga

SEQ ID NO: 50162 - DNA, 50 bp, synthetic construct
  source 1..50: mol_type = other DNA
ttcttatagtagatattttttatataatagcaaaggatttactcttatag

SEQ ID NO: 50163 - DNA, 50 bp, synthetic construct
  source 1..50: mol_type = other DNA
gaatacaaagaatattagaaaaaaattatgaatgcaaattttttgtaaca

SEQ ID NO: 50164 - DNA, 50 bp, synthetic construct
  source 1..50: mol_type = other DNA
attcaacactgatcctatgagttggccaattcctcgataagtttttgaat

SEQ ID NO: 50165 - DNA, 50 bp, synthetic construct
  source 1..50: mol_type = other DNA
gaatgcaagaaaatttatctaagcaaattattatcaatttatttggagag

SEQ ID NO: 50166 - DNA, 50 bp, synthetic construct
  source 1..50: mol_type = other DNA
cagtactatatatcactctaaagacatctagctctatataaccactactt

SEQ ID NO: 50167 - DNA, 50 bp, synthetic construct
  source 1..50: mol_type = other DNA
taaattttatagattcaaaattatatttactttttatccttgtcaatttc

SEQ ID NO: 50168 - DNA, 50 bp, synthetic construct
  source 1..50: mol_type = other DNA
atctttttcatccattcaacctccttctggttgatgtggataataaaaga

SEQ ID NO: 50169 - DNA, 50 bp, synthetic construct
  source 1..50: mol_type = other DNA
ttgctaatttctttcttaaaaaaatattgtagcacatgttatatttgaaa

SEQ ID NO: 50170 - DNA, 50 bp, synthetic construct
  source 1..50: mol_type = other DNA
ccgctgttttaattctttctttatccagcaagatagttttcaaagatttt

SEQ ID NO: 50171 - DNA, 50 bp, synthetic construct
  source 1..50: mol_type = other DNA
aagtaaaaaatatcctaaagaagctttctttagaaggaggatttttaacg

SEQ ID NO: 50172 - DNA, 50 bp, synthetic construct
  source 1..50: mol_type = other DNA
atgaatttattaattaggtaaatttacatgaaactaattaaataagatat

SEQ ID NO: 50173 - DNA, 50 bp, synthetic construct
  source 1..50: mol_type = other DNA
gtagacggccatggaggaagtctagtaagaggttagtggtggcgccgcgc

SEQ ID NO: 50174 - DNA, 50 bp, synthetic construct
  source 1..50: mol_type = other DNA
aactcttggaattatgtattcttcaaaatgaggtgattaaaattagagtt

SEQ ID NO: 50175 - DNA, 50 bp, synthetic construct
  source 1..50: mol_type = other DNA
ctaggggttacagccttatattttaacaaatataatcctgtagttggggc

SEQ ID NO: 50176 - DNA, 50 bp, synthetic construct
  source 1..50: mol_type = other DNA
ataaagaaatgataataggttaatatattatcagtttaccaaaggtttaa

SEQ ID NO: 50177 - DNA, 50 bp, synthetic construct
  source 1..50: mol_type = other DNA
aattccatctgaaacaatctcatcgtgataataatggccgcgatggctgg

SEQ ID NO: 50178 - DNA, 50 bp, synthetic construct
  source 1..50: mol_type = other DNA
tttaagttcttgtcgaaactccatatatgcttttctcaaaacctgctaag

SEQ ID NO: 50179 - DNA, 50 bp, synthetic construct
  source 1..50: mol_type = other DNA
tggttcgtctggctctgctttggtggaaaagaaaaataccaatcacccaa

SEQ ID NO: 50180 - DNA, 50 bp, synthetic construct
  source 1..50: mol_type = other DNA
ttttgtagaagtttcaacaaccaactacttacgatgaaactatggcaagt

SEQ ID NO: 50181 - DNA, 50 bp, synthetic construct
  source 1..50: mol_type = other DNA
tcaacaaacaattataaattgttttaaaaaaatccaatattaaccgccaa

SEQ ID NO: 50182 - DNA, 50 bp, synthetic construct
  source 1..50: mol_type = other DNA
acacactcatgcaaaatagtattattcaattctatatccatagggtgtgt

SEQ ID NO: 50183 - DNA, 50 bp, synthetic construct
  source 1..50: mol_type = other DNA
cttatctattgggtacgggtagtttaaactaaccactcaaaatatgttat

SEQ ID NO: 50184 - DNA, 50 bp, synthetic construct
  source 1..50: mol_type = other DNA
tcttacgataaacactaattcagaacaagcggtgttagattatcgagagg

SEQ ID NO: 50185 - DNA, 50 bp, synthetic construct
  source 1..50: mol_type = other DNA
tgtgtttcgatgggtgtataatattaagtgtgtcaacccattattactaa

SEQ ID NO: 50186 - DNA, 50 bp, synthetic construct
  source 1..50: mol_type = other DNA
tctttctttttagcaagatattctttagagtatcttgtcctatatactaa

SEQ ID NO: 50187 - DNA, 50 bp, synthetic construct
  source 1..50: mol_type = other DNA
tgtacccaaatacggtcggtatttttctccaccgattttgccgcttgagg

SEQ ID NO: 50188 - DNA, 50 bp, synthetic construct
  source 1..50: mol_type = other DNA
aattctcaaaggaagttgttttaaaattataacataactagtctagattt

SEQ ID NO: 50189 - DNA, 50 bp, synthetic construct
  source 1..50: mol_type = other DNA
aacatttaattccacttattaaaaagattgagtaagtggatttagtgtgc

SEQ ID NO: 50190 - DNA, 50 bp, synthetic construct
  source 1..50: mol_type = other DNA
ttcaggtgcttgttttttctttcctgtaaatgaaactgcccgggagtgaa

SEQ ID NO: 50191 - DNA, 50 bp, synthetic construct
  source 1..50: mol_type = other DNA
acataattaaacaagcaatacacattcatggctattttcttttgcaaaca

SEQ ID NO: 50192 - DNA, 50 bp, synthetic construct
  source 1..50: mol_type = other DNA
aaaaaatggcagtatgcgtgggcaaaagacgacttagttttcttcttttt

SEQ ID NO: 50193 - DNA, 50 bp, synthetic construct
  source 1..50: mol_type = other DNA
ctcgtttcgatgggtgtataatattaagtgtgtcaacccattattactaa

SEQ ID NO: 50194 - DNA, 50 bp, synthetic construct
  source 1..50: mol_type = other DNA
gagaatctaaccaaaatgcataggatcctgcggggtttggtatgtctctt

SEQ ID NO: 50195 - DNA, 50 bp, synthetic construct
  source 1..50: mol_type = other DNA
gaaaggaaagggagccgatggctccgtactcattcgcggttcctcctttt

SEQ ID NO: 50196 - DNA, 50 bp, synthetic construct
  source 1..50: mol_type = other DNA
tcttcatcttggggtctaatggtggcaaccattggacccattggctaaat

SEQ ID NO: 50197 - DNA, 50 bp, synthetic construct
  source 1..50: mol_type = other DNA
accacagcacggctatggattccactgggcctgcgagtccggcctgtacc

SEQ ID NO: 50198 - DNA, 50 bp, synthetic construct
  source 1..50: mol_type = other DNA
ggggcgggtgtattgttttacaacatgttgtgagacaatacacctgccga

SEQ ID NO: 50199 - DNA, 50 bp, synthetic construct
  source 1..50: mol_type = other DNA
ttcgatgggtgtataatattagggaacccgaagtgtgtcaacccattatt

SEQ ID NO: 50200 - DNA, 50 bp, synthetic construct
  source 1..50: mol_type = other DNA
atctataaaaagtatctataatatagtaattataccatatttttccataa

SEQ ID NO: 50201 - DNA, 50 bp, synthetic construct
  source 1..50: mol_type = other DNA
tgcatctataaaaagtatctataatattctatcttattttaaaagaaaaa

SEQ ID NO: 50202 - DNA, 50 bp, synthetic construct
  source 1..50: mol_type = other DNA
ggtcgcagttttatccaaacgtcctgttacccttgcaaaaaactgccact

SEQ ID NO: 50203 - DNA, 50 bp, synthetic construct
  source 1..50: mol_type = other DNA
taatttaatatatacaatttgatgtactttcgattttatattgtcaatta

SEQ ID NO: 50204 - DNA, 50 bp, synthetic construct
  source 1..50: mol_type = other DNA
tagagttgtgggttttcttttgcttgagcaaccattattatggttctctc

SEQ ID NO: 50205 - DNA, 50 bp, synthetic construct
  source 1..50: mol_type = other DNA
tgcgaatatggtcgcctttttttaattaagacaacaagaagacctttgat

SEQ ID NO: 50206 - DNA, 50 bp, synthetic construct
  source 1..50: mol_type = other DNA
tatgaaaaccaagttaattattacagatagttattaacgatattgtattc

SEQ ID NO: 50207 - DNA, 50 bp, synthetic construct
  source 1..50: mol_type = other DNA
tttttttgttgtttcgtggtataatatataattacattacacgaaaaaaa

SEQ ID NO: 50208 - DNA, 50 bp, synthetic construct
  source 1..50: mol_type = other DNA
tgttgtcaccttttccttcgttcacacgaaacaacaaaaaaactgcaacc

SEQ ID NO: 50209 - DNA, 50 bp, synthetic construct
  source 1..50: mol_type = other DNA
atcttgattaacatccttgttaactaataattaacttggttttcataact

SEQ ID NO: 50210 - DNA, 50 bp, synthetic construct
  source 1..50: mol_type = other DNA
gataagtcaatgtcaaggaaagataaactctcggtaataattaacttggt

SEQ ID NO: 50211 - DNA, 50 bp, synthetic construct
  source 1..50: mol_type = other DNA
cagcaatcaagctatgagaatcaaattagataaaaatatagacattaaat

SEQ ID NO: 50212 - DNA, 50 bp, synthetic construct
  source 1..50: mol_type = other DNA
agctgtcttggcttgaccttggctgcagtagaggtcaaaccacggaagat

SEQ ID NO: 50213 - DNA, 50 bp, synthetic construct
  source 1..50: mol_type = other DNA
gcgatagcccttttcatagttttctcaaaagacatgccatcaagccgcat

SEQ ID NO: 50214 - DNA, 50 bp, synthetic construct
  source 1..50: mol_type = other DNA
taagatagttcaacttaatattgatatcctttttagagtgatatatagtg

SEQ ID NO: 50215 - DNA, 50 bp, synthetic construct
  source 1..50: mol_type = other DNA
ttgtaagtgactgtgactgaaaggttgtaaactattacaaacaattacgt

SEQ ID NO: 50216 - DNA, 50 bp, synthetic construct
  source 1..50: mol_type = other DNA
cactatattactaaagggagcttcgattcgctcccgatagtcatccaagt

SEQ ID NO: 50217 - DNA, 50 bp, synthetic construct
  source 1..50: mol_type = other DNA
agttatactctaatacatatatcttcagataaatgtattaaagttcctat

SEQ ID NO: 50218 - DNA, 50 bp, synthetic construct
  source 1..50: mol_type = other DNA
taattgacaatataaaatcgaaagtatatcaaattgtatatattaaatta

SEQ ID NO: 50219 - DNA, 50 bp, synthetic construct
  source 1..50: mol_type = other DNA
atataatttactatataggatataatcaaattgtatatattaaattatat

SEQ ID NO: 50220 - DNA, 50 bp, synthetic construct
  source 1..50: mol_type = other DNA
ataaaaaataatttattattttagtatagaacatattttcgattttttca

SEQ ID NO: 50221 - DNA, 50 bp, synthetic construct
  source 1..50: mol_type = other DNA
aaaattgaaatagataaatatacaattatgaatttatatacttaaaattt

SEQ ID NO: 50222 - DNA, 50 bp, synthetic construct
  source 1..50: mol_type = other DNA
tttattattttagtaacattttagtatcttaattaaaataaatttataaa

SEQ ID NO: 50223 - DNA, 50 bp, synthetic construct
  source 1..50: mol_type = other DNA
ataaatacaagttttcatttttgatatttaaaattagaacttttattacc

SEQ ID NO: 50224 - DNA, 50 bp, synthetic construct
  source 1..50: mol_type = other DNA
agtgtattattataatttaactttataaagtactattataggtgtacata

SEQ ID NO: 50225 - DNA, 50 bp, synthetic construct
  source 1..50: mol_type = other DNA
atctataaaaagtatctataatatagttattattagttatttctatggaa

SEQ ID NO: 50226 - DNA, 50 bp, synthetic construct
  source 1..50: mol_type = other DNA
ttaataaaaaataaataaattataactgtaacatagttgttttttattaa

SEQ ID NO: 50227 - DNA, 50 bp, synthetic construct
  source 1..50: mol_type = other DNA
aaaataatttattattttagtaacatcttatattttgatataattatttt

SEQ ID NO: 50228 - DNA, 50 bp, synthetic construct
  source 1..50: mol_type = other DNA
agcaatgcccgtaaatactacaatgaatcatagtattttctttattttca

SEQ ID NO: 50229 - DNA, 50 bp, synthetic construct
  source 1..50: mol_type = other DNA
catcattatatcactgtccccgcttcgtcgtttttccctacaatgtcaag

SEQ ID NO: 50230 - DNA, 50 bp, synthetic construct
  source 1..50: mol_type = other DNA
tgctaagatagaaaagacactcatctatgatagcaacaaataaagtagct

SEQ ID NO: 50231 - DNA, 50 bp, synthetic construct
  source 1..50: mol_type = other DNA
tcagttacctaaatcacattaggtttcgttggtgtaacttagacaacaat

SEQ ID NO: 50232 - DNA, 50 bp, synthetic construct
  source 1..50: mol_type = other DNA
caaatttggcctatcattgcgttcatcacggcaatgacaggaggcttttg

SEQ ID NO: 50233 - DNA, 50 bp, synthetic construct
  source 1..50: mol_type = other DNA
gtgtatcaatagaaaggtctcttcaggataacacctttcttatgatacac

SEQ ID NO: 50234 - DNA, 50 bp, synthetic construct
  source 1..50: mol_type = other DNA
aacagtaataagcagtatatcatggtgattatcaacagtaaattactgta

SEQ ID NO: 50235 - DNA, 50 bp, synthetic construct
  source 1..50: mol_type = other DNA
gaattatgaagtgcatcataatctgttcattacaatgcactatctcagcg

SEQ ID NO: 50236 - DNA, 50 bp, synthetic construct
  source 1..50: mol_type = other DNA
ttggtagtgttattgacacaagtttaaacatatgttaatatcactactca

SEQ ID NO: 50237 - DNA, 50 bp, synthetic construct
  source 1..50: mol_type = other DNA
tacggtctttctccaaggaactgcgagacgattttgtgagaagtaccgta

SEQ ID NO: 50238 - DNA, 50 bp, synthetic construct
  source 1..50: mol_type = other DNA
tgctcgtttaaaatggttgcgtaataatacacaacctttttaaagtttgc

SEQ ID NO: 50239 - DNA, 50 bp, synthetic construct
  source 1..50: mol_type = other DNA
aaccattcttgtagttatgcactgtatagtgataacttgcattttatgtt

SEQ ID NO: 50240 - DNA, 50 bp, synthetic construct
  source 1..50: mol_type = other DNA
ttaagacattatacttgatatgctatagcatatcacaaataataaaataa

SEQ ID NO: 50241 - DNA, 50 bp, synthetic construct
  source 1..50: mol_type = other DNA
acccattcttgtagttattcactgtatagtgataacttacattctatgtt

SEQ ID NO: 50242 - DNA, 50 bp, synthetic construct
  source 1..50: mol_type = other DNA
gtataattttattcctgtaaactttatgattaacaggaatactgatatag

SEQ ID NO: 50243 - DNA, 50 bp, synthetic construct
  source 1..50: mol_type = other DNA
aatgatgatttgggtggggatattgaagtatttatgttataatccccatc

SEQ ID NO: 50244 - DNA, 50 bp, synthetic construct
  source 1..50: mol_type = other DNA
cacgaacattcaaatatggtgacgatgataacgtttattttcagtcactt

SEQ ID NO: 50245 - DNA, 50 bp, synthetic construct
  source 1..50: mol_type = other DNA
tggtgtacacactgtactaactaggaacagttgtgttagactgtacgcca

SEQ ID NO: 50246 - DNA, 50 bp, synthetic construct
  source 1..50: mol_type = other DNA
ataaaataggtacaagaaaagacatcagctgttacctggaccttgtttat

SEQ ID NO: 50247 - DNA, 50 bp, synthetic construct
  source 1..50: mol_type = other DNA
gtcaaggaattatcttgtagttaagcagcctaatgatataaatccaatct

SEQ ID NO: 50248 - DNA, 50 bp, synthetic construct
  source 1..50: mol_type = other DNA
tttagtacctcgttatctctcgctggacggagacgaatcgagaaactaaa

SEQ ID NO: 50249 - DNA, 50 bp, synthetic construct
  source 1..50: mol_type = other DNA
caacttgtaatagtgttggtaataatgtttaccaacactataacacaaca

SEQ ID NO: 50250 - DNA, 50 bp, synthetic construct
  source 1..50: mol_type = other DNA
tgcggctcttacaacaaaaacagctcgcagtttttaggggaaatgccgta

SEQ ID NO: 50251 - DNA, 50 bp, synthetic construct
  source 1..50: mol_type = other DNA
ggttgtatttgtgttagatgttgggtacaaatgctaacattgatacaaac

SEQ ID NO: 50252 - DNA, 50 bp, synthetic construct
  source 1..50: mol_type = other DNA
tatgtcaataatgtaaaaaaatcccgggatatgtttccattattgacatg

SEQ ID NO: 50253 - DNA, 50 bp, synthetic construct
  source 1..50: mol_type = other DNA
atgcgggaggatttgacccccatcgagccgacggtgggatagacccgcag

SEQ ID NO: 50254 - DNA, 50 bp, synthetic construct
  source 1..50: mol_type = other DNA
ggcttgcggcttggtgccgggactggaccatattctccaatgcggcggcg

SEQ ID NO: 50255 - DNA, 50 bp, synthetic construct
  source 1..50: mol_type = other DNA
aaaatgcagtgaaagcaacagacaagtgtatgttgctgacagggagtgca

SEQ ID NO: 50256 - DNA, 50 bp, synthetic construct
  source 1..50: mol_type = other DNA
gccagtttatggtaagaataaaatgcttttggagatttcatgaatgcggc

SEQ ID NO: 50257 - DNA, 50 bp, synthetic construct
  source 1..50: mol_type = other DNA
agcctataaagggctcttagtttgcgcaaactaaaacaataacaatcact

SEQ ID NO: 50258 - DNA, 50 bp, synthetic construct
  source 1..50: mol_type = other DNA
cggtttacgccgcgcgcgtgtaaccccttgtaagttacaactgaaaaccg

SEQ ID NO: 50259 - DNA, 50 bp, synthetic construct
  source 1..50: mol_type = other DNA
tgtcatcaccctgttggcgtcaacctaattacaccaacaaggtgacgaca

SEQ ID NO: 50260 - DNA, 50 bp, synthetic construct
  source 1..50: mol_type = other DNA
tgtcgtcaccttgttggtgtaattaggttgacgccaacacggtagcgaca

SEQ ID NO: 50261 - DNA, 50 bp, synthetic construct
  source 1..50: mol_type = other DNA
tgtcgtcaccttgttggtgtaattaggttgacgccaacatggtagcaaca

SEQ ID NO: 50262 - DNA, 50 bp, synthetic construct
  source 1..50: mol_type = other DNA
tttttgcttaataggacaattagaggtctaatcgtctgattaagcaaaac

SEQ ID NO: 50263 - DNA, 50 bp, synthetic construct
  source 1..50: mol_type = other DNA
acagaagtaaagtttaccgttatttatcaaaccgtaaactataaggatat

SEQ ID NO: 50264 - DNA, 50 bp, synthetic construct
  source 1..50: mol_type = other DNA
caaatttatattaaaagcaccttagttaaggtgctttttctataattatt

SEQ ID NO: 50265 - DNA, 50 bp, synthetic construct
  source 1..50: mol_type = other DNA
caatatctcaatgttacattaccatcatgcaataccacattgagaacctg

SEQ ID NO: 50266 - DNA, 50 bp, synthetic construct
  source 1..50: mol_type = other DNA
atagaatttatttttaatgttcccatgggaacattttgatttaatacttt

SEQ ID NO: 50267 - DNA, 50 bp, synthetic construct
  source 1..50: mol_type = other DNA
aataatgtctaagattggatttatatcaataaatatattgtgttattttt

SEQ ID NO: 50268 - DNA, 50 bp, synthetic construct
  source 1..50: mol_type = other DNA
cgctaacctttaaatttgtttgtatattacaacaaactatcagtctcttt

SEQ ID NO: 50269 - DNA, 50 bp, synthetic construct
  source 1..50: mol_type = other DNA
cggtgtacatactttacctactgggaacagttagtgtattatgtacgcca

SEQ ID NO: 50270 - DNA, 50 bp, synthetic construct
  source 1..50: mol_type = other DNA
agtttgttgtaatagacactacatatgtgttatgtttatacaaataaatt

SEQ ID NO: 50271 - DNA, 50 bp, synthetic construct
  source 1..50: mol_type = other DNA
acttatggctgagaataacatgtatttagtacatttttacattgttaata

SEQ ID NO: 50272 - DNA, 50 bp, synthetic construct
  source 1..50: mol_type = other DNA
cggcgcacatacttcttgacgatatccatcgtcgagctataattgcacca

SEQ ID NO: 50273 - DNA, 50 bp, synthetic construct
  source 1..50: mol_type = other DNA
tttgtatattggctaacgttcgggttgccgagcgttagccaatatacatg

SEQ ID NO: 50274 - DNA, 50 bp, synthetic construct
  source 1..50: mol_type = other DNA
caatttttatttcaaaccgcgctccggagcacggtttttatttttaattg

SEQ ID NO: 50275 - DNA, 50 bp, synthetic construct
  source 1..50: mol_type = other DNA
ataaaacattttttcatttagccgtttcatctaatttagaaattactgtt

SEQ ID NO: 50276 - DNA, 50 bp, synthetic construct
  source 1..50: mol_type = other DNA
acattataaatataattctgtagagatattttctaatgttttattgtcgt

SEQ ID NO: 50277 - DNA, 50 bp, synthetic construct
  source 1..50: mol_type = other DNA
tcgcataaatagatagattggtattctccgttacatatctgtatatgctg

SEQ ID NO: 50278 - DNA, 50 bp, synthetic construct
  source 1..50: mol_type = other DNA
tgccaaagaattaaagctatgaattaattcatacttttaattaaaaccat

SEQ ID NO: 50279 - DNA, 50 bp, synthetic construct
  source 1..50: mol_type = other DNA
gaaatttgatttgcgattattaatccatccgcgcccgcaaatcttacttt

SEQ ID NO: 50280 - DNA, 50 bp, synthetic construct
  source 1..50: mol_type = other DNA
gtacgtgtttagctatgtaaaagcaccagtattcttgccttaacactcat

SEQ ID NO: 50281 - DNA, 50 bp, synthetic construct
  source 1..50: mol_type = other DNA
tccccaacctgaaagggattattttcgttagaccggtttccggtgcggga

SEQ ID NO: 50282 - DNA, 50 bp, synthetic construct
  source 1..50: mol_type = other DNA
acgtatgcttttataaaccttagtgggttagatggtataaaagcagataa

SEQ ID NO: 50283 - DNA, 50 bp, synthetic construct
  source 1..50: mol_type = other DNA
tttggtatctcgtttcttcttcttccagcgagagaaatcgagagactaaa

SEQ ID NO: 50284 - DNA, 50 bp, synthetic construct
  source 1..50: mol_type = other DNA
tcacccttgacatcaatactaccgtccacgtgttttgagatgaattcata

SEQ ID NO: 50285 - DNA, 50 bp, synthetic construct
  source 1..50: mol_type = other DNA
tttggtatctcgtttattcttcttccaacgagagaaaacgaggaactaaa

SEQ ID NO: 50286 - DNA, 50 bp, synthetic construct
  source 1..50: mol_type = other DNA
ctttcgctcatgtggctcttctgctaggggaaatgccgtaaattacaact

SEQ ID NO: 50287 - DNA, 50 bp, synthetic construct
  source 1..50: mol_type = other DNA
attagtatctcgtttattctccgtccagtgagagaaaatgagggactaaa

SEQ ID NO: 50288 - DNA, 50 bp, synthetic construct
  source 1..50: mol_type = other DNA
tccaattctatccaaaacctcatttaagtgaggttttttatctattaatt

SEQ ID NO: 50289 - DNA, 50 bp, synthetic construct
  source 1..50: mol_type = other DNA
tttcacaaatcatacccgtaaaatgaaatgaagggaagcgttttgagaaa

SEQ ID NO: 50290 - DNA, 50 bp, synthetic construct
  source 1..50: mol_type = other DNA
tctatcactcttgtacacagtgccgctccaatgtatacgtgatcttaatg

SEQ ID NO: 50291 - DNA, 50 bp, synthetic construct
  source 1..50: mol_type = other DNA
tgcgttctaggacggttacggactcaacatgtcccggcaacctttacgtc

SEQ ID NO: 50292 - DNA, 50 bp, synthetic construct
  source 1..50: mol_type = other DNA
aaaggcggttcgacgtttcttcgtcgctgcgccattttcaaattgccctt

SEQ ID NO: 50293 - DNA, 50 bp, synthetic construct
  source 1..50: mol_type = other DNA
ccgcggcaaggaagacacatacggaacgccgcagtaagaagcaacctcgc

SEQ ID NO: 50294 - DNA, 50 bp, synthetic construct
  source 1..50: mol_type = other DNA
cgcttttgtatccagcgtggcatgaaccagtcacgatggatacaagactc

SEQ ID NO: 50295 - DNA, 50 bp, synthetic construct
  source 1..50: mol_type = other DNA
aaaattttactatagacgggttgacatacacccatcaacaagaaagagcg

SEQ ID NO: 50296 - DNA, 50 bp, synthetic construct
  source 1..50: mol_type = other DNA
ggttgtatttgtgttagatgctgggtacaaatgctaacattgatacaaac

SEQ ID NO: 50297 - DNA, 50 bp, synthetic construct
  source 1..50: mol_type = other DNA
ctatggcttatgctacctcgccgaattcgggttttgaaagtatctggttt

SEQ ID NO: 50298 - DNA, 50 bp, synthetic construct
  source 1..50: mol_type = other DNA
ataaaatgggtacaagaaaacatctcagctgttacctgaaccttgtttat

SEQ ID NO: 50299 - DNA, 50 bp, synthetic construct
  source 1..50: mol_type = other DNA
actttatttgttgttatcatagtagtatttatgaaaaggacatatagaga

SEQ ID NO: 50300 - DNA, 50 bp, synthetic construct
  source 1..50: mol_type = other DNA
aaatttaaattgaactttatcttagcatatcataaatgatgcggtttttt

SEQ ID NO: 50301 - DNA, 50 bp, synthetic construct
  source 1..50: mol_type = other DNA
tttacaaaatgtttcgatatttgttcaaggagaaatgatcattttgatcg

SEQ ID NO: 50302 - DNA, 50 bp, synthetic construct
  source 1..50: mol_type = other DNA
catcatcattatgctggtatgttggtcaatatacccgtataatcgtcacc

SEQ ID NO: 50303 - DNA, 50 bp, synthetic construct
  source 1..50: mol_type = other DNA
atattgtaattagcaatacacactcaaatgtgttatgcttatacaaacaa

SEQ ID NO: 50304 - DNA, 50 bp, synthetic construct
  source 1..50: mol_type = other DNA
tacagggtgcataagaaagtgaagattttcacttcctaaaacacccctta

SEQ ID NO: 50305 - DNA, 50 bp, synthetic construct
  source 1..50: mol_type = other DNA
attcaatacctaaaatgatgtgtttaaatacactatgagaacatccgaat

SEQ ID NO: 50306 - DNA, 50 bp, synthetic construct
  source 1..50: mol_type = other DNA
ccctaatcatcctcatagtgcatttaaatacaccatctaaaacgatacaa

SEQ ID NO: 50307 - DNA, 50 bp, synthetic construct
  source 1..50: mol_type = other DNA
ttgtttgtataatcataacacatttgagtgtgtaacgcttattacaaaaa

SEQ ID NO: 50308 - DNA, 50 bp, synthetic construct
  source 1..50: mol_type = other DNA
aatctcatagtgtatttagaccttgacacgtttaaatacaccatctaaaa

SEQ ID NO: 50309 - DNA, 50 bp, synthetic construct
  source 1..50: mol_type = other DNA
ttattcattgttttcattgaatttgtaaatttttaaaatgaaaaaaatga

SEQ ID NO: 50310 - DNA, 50 bp, synthetic construct
  source 1..50: mol_type = other DNA
accttctagtttttgtttgtataagctaattacaatatttacgcccatcc

SEQ ID NO: 50311 - DNA, 50 bp, synthetic construct
  source 1..50: mol_type = other DNA
atcctcatagtgcatttagaccttgacacgtttaaatacaccatctaaag

SEQ ID NO: 50312 - DNA, 50 bp, synthetic construct
  source 1..50: mol_type = other DNA
ataaaataggtacaagaaaagacatcagctgtcaccttaaccttgtttat

SEQ ID NO: 50313 - DNA, 50 bp, synthetic construct
  source 1..50: mol_type = other DNA
gttcgcaggagcgtaaaggttggctccacggtctttaccccagtcggacg

SEQ ID NO: 50314 - DNA, 50 bp, synthetic construct
  source 1..50: mol_type = other DNA
aaacattaagtttggacaatagcgcttatcattgtccaaacttatattta

SEQ ID NO: 50315 - DNA, 50 bp, synthetic construct
  source 1..50: mol_type = other DNA
tttttattgtatgttgaaattaactagttaacctcaaaacaccataaaaa

SEQ ID NO: 50316 - DNA, 50 bp, synthetic construct
  source 1..50: mol_type = other DNA
acaaacgaaaatcaatttcatttgtcttcaccgaattaattactaaccaa

SEQ ID NO: 50317 - DNA, 50 bp, synthetic construct
  source 1..50: mol_type = other DNA
cgcggactacgaccggcagtacgacggtggcatataggtatgggtgcgcc

SEQ ID NO: 50318 - DNA, 50 bp, synthetic construct
  source 1..50: mol_type = other DNA
aatatgcacacgtaatctttaagtgagctataggcgtaggtgtgcagttt

SEQ ID NO: 50319 - DNA, 50 bp, synthetic construct
  source 1..50: mol_type = other DNA
aaatgcctaagattggttttttatcaatcaataagtaaactaaattccat

SEQ ID NO: 50320 - DNA, 50 bp, synthetic construct
  source 1..50: mol_type = other DNA
aagccactatgttgttttgtggcatactacacggaacttttggcgcaagt

SEQ ID NO: 50321 - DNA, 50 bp, synthetic construct
  source 1..50: mol_type = other DNA
ctcggcttttctactaagaacagctcgcagttcttgggggaaatgccgta

SEQ ID NO: 50322 - DNA, 50 bp, synthetic construct
  source 1..50: mol_type = other DNA
ctcgtgggtattttacacttgaacaagttacagtgtcaattcaacacgcc

SEQ ID NO: 50323 - DNA, 50 bp, synthetic construct
  source 1..50: mol_type = other DNA
ctcggctcttttataaataatatctcgcagtttttgggggaaatgccgta

SEQ ID NO: 50324 - DNA, 50 bp, synthetic construct
  source 1..50: mol_type = other DNA
taacaagaattgctcgcagttcttgaaatgccgtagagaacgactttgca

SEQ ID NO: 50325 - DNA, 50 bp, synthetic construct
  source 1..50: mol_type = other DNA
tacggcatttctcctaaaaactgcgagctgtttttatcagaagagccttg

SEQ ID NO: 50326 - DNA, 50 bp, synthetic construct
  source 1..50: mol_type = other DNA
atgcaaagttgtgctctacggcatttattgaatagaccacaaaaaagccc

SEQ ID NO: 50327 - DNA, 50 bp, synthetic construct
  source 1..50: mol_type = other DNA
agctcttttgctcaaaataaaacagctgtcctatcgtggggcgtatctgt

SEQ ID NO: 50328 - DNA, 50 bp, synthetic construct
  source 1..50: mol_type = other DNA
catatccatcttgagtcttctttctcgcaagacaacacgaaatagacaca

SEQ ID NO: 50329 - DNA, 50 bp, synthetic construct
  source 1..50: mol_type = other DNA
ttgtattctcaaggaacagacaacacgtggagtgcgtagtgttgctacaa

SEQ ID NO: 50330 - DNA, 50 bp, synthetic construct
  source 1..50: mol_type = other DNA
tacaggtgttaataaagagatcaccggtgtcaatttttatagatgaattt

SEQ ID NO: 50331 - DNA, 50 bp, synthetic construct
  source 1..50: mol_type = other DNA
gtcaggtatcagggtatagggcggcaccgcattctaccaaaatgtcattt

SEQ ID NO: 50332 - DNA, 50 bp, synthetic construct
  source 1..50: mol_type = other DNA
aattagttttcttatatgttgtttaaaaatgacatataagaatattagtt

SEQ ID NO: 50333 - DNA, 50 bp, synthetic construct
  source 1..50: mol_type = other DNA
agtttcaggatgtgttaatcgcacctatgatttaaacacatccttaacta

SEQ ID NO: 50334 - DNA, 50 bp, synthetic construct
  source 1..50: mol_type = other DNA
gaaaatgcaccgctgaggtcacttaaaagcattttcaaaagtgctttttc

SEQ ID NO: 50335 - DNA, 50 bp, synthetic construct
  source 1..50: mol_type = other DNA
ataatccttccaagttcacaaaaaacttcatggtcatcaggattttttag

SEQ ID NO: 50336 - DNA, 50 bp, synthetic construct
  source 1..50: mol_type = other DNA
ttaaagagttcgaagataatcctttaatgacaccattaggacaatttagg

SEQ ID NO: 50337 - DNA, 50 bp, synthetic construct
  source 1..50: mol_type = other DNA
caatatctttaactatgtgataccggggtatcacttagttaaagatacca

SEQ ID NO: 50338 - DNA, 50 bp, synthetic construct
  source 1..50: mol_type = other DNA
tagtcagtatctcgataaacagacaaagctgtttttaaagatactgacta

SEQ ID NO: 50339 - DNA, 50 bp, synthetic construct
  source 1..50: mol_type = other DNA
atttgtttgtttacattagccgttatgtatgataatctctacaaacaaat

SEQ ID NO: 50340 - DNA, 50 bp, synthetic construct
  source 1..50: mol_type = other DNA
aggaatgtgatttttaaacagtgaattcgcagtataaaaatgatatagct

SEQ ID NO: 50341 - DNA, 50 bp, synthetic construct
  source 1..50: mol_type = other DNA
agtttggacaatagtacaccggttgaggcggttgtgaaattgtccaaacg

SEQ ID NO: 50342 - DNA, 50 bp, synthetic construct
  source 1..50: mol_type = other DNA
tttatagttagttattagttactgtacggtaactaataaccaacaattta

SEQ ID NO: 50343 - DNA, 50 bp, synthetic construct
  source 1..50: mol_type = other DNA
cctgccatcctttcaccaccatcagaagatgattttgaaagcttgcttca

SEQ ID NO: 50344 - DNA, 50 bp, synthetic construct
  source 1..50: mol_type = other DNA
aggtaattccgtagccccagcataattttatcattttttaggaaattttg

SEQ ID NO: 50345 - DNA, 50 bp, synthetic construct
  source 1..50: mol_type = other DNA
ttcggttcttttgcaaagaactgctcgcagttattgggggaaatgccgta

SEQ ID NO: 50346 - DNA, 50 bp, synthetic construct
  source 1..50: mol_type = other DNA
aaatagttatgtctttaaggaaacttgtatcggttatgacataactctag

SEQ ID NO: 50347 - DNA, 50 bp, synthetic construct
  source 1..50: mol_type = other DNA
gagttatgtcataaccgatacaataccttagttaggtttccttaaaggca

SEQ ID NO: 50348 - DNA, 50 bp, synthetic construct
  source 1..50: mol_type = other DNA
gaaaggtaaatgctaccgactattactattgttggcaatatttaccttat

SEQ ID NO: 50349 - DNA, 50 bp, synthetic construct
  source 1..50: mol_type = other DNA
tatagtgttggtaatggtttatacatgttttctcttttaccaacactatc

SEQ ID NO: 50350 - DNA, 50 bp, synthetic construct
  source 1..50: mol_type = other DNA
tgagtagtgatattaacatatgtttaaacttgtgtcaataacactaccaa

SEQ ID NO: 50351 - DNA, 50 bp, synthetic construct
  source 1..50: mol_type = other DNA
caatcaacagaaacatttatctttgaaataattcttgtaactgtagtcgc

SEQ ID NO: 50352 - DNA, 50 bp, synthetic construct
  source 1..50: mol_type = other DNA
gagtggtttattatttacttttctaatgacaactatataataaaccgctc

SEQ ID NO: 50353 - DNA, 50 bp, synthetic construct
  source 1..50: mol_type = other DNA
tgcctttaagaaaacctaactaaggtattgtatcggttatgacataactc

SEQ ID NO: 50354 - DNA, 50 bp, synthetic construct
  source 1..50: mol_type = other DNA
aatttgtgatctttcccgaagaaagtttccttcaggagagttaggtgatt

SEQ ID NO: 50355 - DNA, 50 bp, synthetic construct
  source 1..50: mol_type = other DNA
aaaatgtcatagtgttggtaataactttattaccaacagtattgcagatt

SEQ ID NO: 50356 - DNA, 50 bp, synthetic construct
  source 1..50: mol_type = other DNA
taaaaaggttgtgtattggagcgtttacatagtattacacaaccatttta

SEQ ID NO: 50357 - DNA, 50 bp, synthetic construct
  source 1..50: mol_type = other DNA
aacttaaaaactgtggtatacatgctaatgtaaacaactgtagtttttgc

SEQ ID NO: 50358 - DNA, 50 bp, synthetic construct
  source 1..50: mol_type = other DNA
gatatgcacacctaatctttaagtgagcagttggcgtacgtgtgcatatt

SEQ ID NO: 50359 - DNA, 50 bp, synthetic construct
  source 1..50: mol_type = other DNA
accagtaacctggtgccccctttcatgaatacgggcactggactatcaat

SEQ ID NO: 50360 - DNA, 50 bp, synthetic construct
  source 1..50: mol_type = other DNA
aattagttatgcctttaagaaaacatcggttatgacataactctagaatc

SEQ ID NO: 50361 - DNA, 50 bp, synthetic construct
  source 1..50: mol_type = other DNA
gcagccattaaaaaataaggtaaatatttaccttttttgaatatggctta

SEQ ID NO: 50362 - DNA, 50 bp, synthetic construct
  source 1..50: mol_type = other DNA
gtgcatcataatctgtatagtactttagtaacatgttcatttcaatgcaa

SEQ ID NO: 50363 - DNA, 50 bp, synthetic construct
  source 1..50: mol_type = other DNA
caagggcttgaatgtggcggagagatgtggcgggcagataaggatgaata

SEQ ID NO: 50364 - DNA, 50 bp, synthetic construct
  source 1..50: mol_type = other DNA
ggattgcgatgctatcacccactcttgggtttccattagtatcgcaccta

SEQ ID NO: 50365 - DNA, 50 bp, synthetic construct
  source 1..50: mol_type = other DNA
ccctgaataatcagagctttgttcatgtggcgggcagataaggatgaata

SEQ ID NO: 50366 - DNA, 50 bp, synthetic construct
  source 1..50: mol_type = other DNA
caaaggtaaataataccaacaagagtaattgatggcaatattaaccttta

SEQ ID NO: 50367 - DNA, 50 bp, synthetic construct
  source 1..50: mol_type = other DNA
aatctgtaatagtgttggtaatacagttattaccaacactatgacatttt

SEQ ID NO: 50368 - DNA, 50 bp, synthetic construct
  source 1..50: mol_type = other DNA
gttgtgatgagtgttcgtccaccgtctgcatactgaacactgatactttt

SEQ ID NO: 50369 - DNA, 50 bp, synthetic construct
  source 1..50: mol_type = other DNA
tgcttgtttaaaatggttgtgtaataatacacaacctttacaacgtctgc

SEQ ID NO: 50370 - DNA, 50 bp, synthetic construct
  source 1..50: mol_type = other DNA
agggtatatacaaaaattctattggccgaatgctacattgtctgcaccct

SEQ ID NO: 50371 - DNA, 50 bp, synthetic construct
  source 1..50: mol_type = other DNA
cagttcccgttttcggtacaatatggagaatgggacgattatgggtactg

SEQ ID NO: 50372 - DNA, 50 bp, synthetic construct
  source 1..50: mol_type = other DNA
tatctacctcatgagttcactacctacgtagtaaactcattttgtattaa

SEQ ID NO: 50373 - DNA, 50 bp, synthetic construct
  source 1..50: mol_type = other DNA
tgggattttaccaaagttcagggaattgtccattccccaaataaaaaatt

SEQ ID NO: 50374 - DNA, 50 bp, synthetic construct
  source 1..50: mol_type = other DNA
aaattatttttaatgtcgtcaatcatgataagctacatttatgattgttt

SEQ ID NO: 50375 - DNA, 50 bp, synthetic construct
  source 1..50: mol_type = other DNA
aacggcaaattatatcgtgaattttaaaattctttatatcttccacttga

SEQ ID NO: 50376 - DNA, 50 bp, synthetic construct
  source 1..50: mol_type = other DNA
gacatcaaacagaccgtctcaacgtggctcgatacgtgctgattgatgtc

SEQ ID NO: 50377 - DNA, 50 bp, synthetic construct
  source 1..50: mol_type = other DNA
tatcgtactttaacataggaaacatgtccatcatgtataaaaatacgagt

SEQ ID NO: 50378 - DNA, 50 bp, synthetic construct
  source 1..50: mol_type = other DNA
gccgtctgttaaattggtagcgggggcgcgcagccaactggacagactga

SEQ ID NO: 50379 - DNA, 50 bp, synthetic construct
  source 1..50: mol_type = other DNA
gcctgccaatgaaatcgtaattcccaagacatagtatatcatctttccgg

SEQ ID NO: 50380 - DNA, 50 bp, synthetic construct
  source 1..50: mol_type = other DNA
atgttgtaataaacgtcacacactcaagtgtgatatgcttatacaaacaa

SEQ ID NO: 50381 - DNA, 50 bp, synthetic construct
  source 1..50: mol_type = other DNA
aagacgttaattgagaaccacatcatgatgcggttttttcagccgcttca

SEQ ID NO: 50382 - DNA, 50 bp, synthetic construct
  source 1..50: mol_type = other DNA
ttatgtttttaagaagcttatcataaatgatgcggtttttattaattagt

SEQ ID NO: 50383 - DNA, 50 bp, synthetic construct
  source 1..50: mol_type = other DNA
aacttattacttaaaaaccgcatcatgcggtttttattaattagttgctt

SEQ ID NO: 50384 - DNA, 50 bp, synthetic construct
  source 1..50: mol_type = other DNA
ttagtgaggaaaattgataccgaatattcggcatcgtaatataagccata

SEQ ID NO: 50385 - DNA, 50 bp, synthetic construct
  source 1..50: mol_type = other DNA
aaataagaggtgcatttagaccttgacgcgtttaaatacaccatctaaag

SEQ ID NO: 50386 - DNA, 50 bp, synthetic construct
  source 1..50: mol_type = other DNA
tgcactccaaggaaggttctaaccgtccctagtaccgcccttagcgcaac

SEQ ID NO: 50387 - DNA, 50 bp, synthetic construct
  source 1..50: mol_type = other DNA
gaatcaaacttcgcgcgcatcttgaataatgcgcgcgtagttctcatcgt

SEQ ID NO: 50388 - DNA, 50 bp, synthetic construct
  source 1..50: mol_type = other DNA
ggcggtcatgcaaacacccctttcacgaagccctcaagtgcaaggagacc

SEQ ID NO: 50389 - DNA, 50 bp, synthetic construct
  source 1..50: mol_type = other DNA
caaaatcataatcgatgtgtttaatattatcaactcatcataaaatcata

SEQ ID NO: 50390 - DNA, 50 bp, synthetic construct
  source 1..50: mol_type = other DNA
ttatgcctttaaggaaacctaactaaggtattgtatcggttatgacataa

SEQ ID NO: 50391 - DNA, 50 bp, synthetic construct
  source 1..50: mol_type = other DNA
aaaaggtaaataataccaacaagcactattgctggcaatattaacccttt

SEQ ID NO: 50392 - DNA, 50 bp, synthetic construct
  source 1..50: mol_type = other DNA
aaatcacccagctctcccgaagggaatccttcgggattcgtcacattttt

SEQ ID NO: 50393 - DNA, 50 bp, synthetic construct
  source 1..50: mol_type = other DNA
atgtagtataacatgcagttgtctttagtcaactgtatgatagacgacat

SEQ ID NO: 50394 - DNA, 50 bp, synthetic construct
  source 1..50: mol_type = other DNA
aaatcacccaactctcccgaaggaaattcttcgggattcatcacatttta

SEQ ID NO: 50395 - DNA, 50 bp, synthetic construct
  source 1..50: mol_type = other DNA
tggggattttaccaaagtttagggaaccttaatacttgagtcaattaccc

SEQ ID NO: 50396 - DNA, 50 bp, synthetic construct
  source 1..50: mol_type = other DNA
gtggaaatgaactcaccgaccgcctttaccttgcttgaattcatcaagtg

SEQ ID NO: 50397 - DNA, 50 bp, synthetic construct
  source 1..50: mol_type = other DNA
tcataatctgtaatagtgttggtaattaccaacactatgacattttaaac

SEQ ID NO: 50398 - DNA, 50 bp, synthetic construct
  source 1..50: mol_type = other DNA
tcataatatgtaatagtgttggtaattaccaacactatgacattttaaac

SEQ ID NO: 50399 - DNA, 50 bp, synthetic construct
  source 1..50: mol_type = other DNA
tgcgtttttataatggttgtgtaataatacacaacctttttaaagtttgc

SEQ ID NO: 50400 - DNA, 50 bp, synthetic construct
  source 1..50: mol_type = other DNA
gttttgtggaggttgctgcccgactcgtggaacatcaacctgtacacaac

SEQ ID NO: 50401 - DNA, 50 bp, synthetic construct
  source 1..50: mol_type = other DNA
gttgtgtacaggttgatgttccacgaggcggacagcaacctccacaaaac

SEQ ID NO: 50402 - DNA, 50 bp, synthetic construct
  source 1..50: mol_type = other DNA
tgctcgtttaaaatggttgtgtaataatacacaacctttttaaagtttgc

SEQ ID NO: 50403 - DNA, 50 bp, synthetic construct
  source 1..50: mol_type = other DNA
ttttttacgttgtttagtacctcaatcgagaaactaaaattataaataaa

SEQ ID NO: 50404 - DNA, 50 bp, synthetic construct
  source 1..50: mol_type = other DNA
tttatttataattttagtttctcgattgaggtactaaacaacgtaaaaaa

SEQ ID NO: 50405 - DNA, 50 bp, synthetic construct
  source 1..50: mol_type = other DNA
cttgtcagcagacagaccgtctcaacataggtcttatacaatttaacaag

SEQ ID NO: 50406 - DNA, 50 bp, synthetic construct
  source 1..50: mol_type = other DNA
aaaaaattaaaaataaaccgcatcatgacgcggttttttagccctttgta

SEQ ID NO: 50407 - DNA, 50 bp, synthetic construct
  source 1..50: mol_type = other DNA
tcaaaaaccgcatcattaactgataataaaactaaaaaataggttgcgca

SEQ ID NO: 50408 - DNA, 50 bp, synthetic construct
  source 1..50: mol_type = other DNA
ggtttctatggtataatgagagaagttttctatattatacctaaagaaaa

SEQ ID NO: 50409 - DNA, 50 bp, synthetic construct
  source 1..50: mol_type = other DNA
atcaactaaatgagagttattctcatgataatagttctcattgtgaggcg

SEQ ID NO: 50410 - DNA, 50 bp, synthetic construct
  source 1..50: mol_type = other DNA
atcattaactgatacgcagaagcgtaatgagaggcgaggcttatcataaa

SEQ ID NO: 50411 - DNA, 50 bp, synthetic construct
  source 1..50: mol_type = other DNA
tactccggcaggagtgcccagttttgaaactgggcactcctatgtcattg

SEQ ID NO: 50412 - DNA, 50 bp, synthetic construct
  source 1..50: mol_type = other DNA
tgtatcaaattgagtacgcataccgaagtgtgagttctgaaattgataca

SEQ ID NO: 50413 - DNA, 50 bp, synthetic construct
  source 1..50: mol_type = other DNA
ttaaaaaccgcatcactacctgataaattaggttgtgtataacttaaaaa

SEQ ID NO: 50414 - DNA, 50 bp, synthetic construct
  source 1..50: mol_type = other DNA
ttcatgtagtaaaaagattaactcaatggttagtcctgttactacatatt

SEQ ID NO: 50415 - DNA, 50 bp, synthetic construct
  source 1..50: mol_type = other DNA
tttttgcgattttagtggtataataagtaataacataaatagagcttgct

SEQ ID NO: 50416 - DNA, 50 bp, synthetic construct
  source 1..50: mol_type = other DNA
gctgaaaaaaccgcatcatttatgatgataactttcccctaattagtgat

SEQ ID NO: 50417 - DNA, 50 bp, synthetic construct
  source 1..50: mol_type = other DNA
acaccagaaccgcttcaatcaagaatttttgataccatatactttataca

SEQ ID NO: 50418 - DNA, 50 bp, synthetic construct
  source 1..50: mol_type = other DNA
aaatccactataaacttgttcgataaggcgacaaacgagcaaaatcggtt

SEQ ID NO: 50419 - DNA, 50 bp, synthetic construct
  source 1..50: mol_type = other DNA
aaatcgtcatcaaagctgtaaaaacttgcaaggattgtcattgaaccatt

SEQ ID NO: 50420 - DNA, 50 bp, synthetic construct
  source 1..50: mol_type = other DNA
aaagttctgtatcgccattcgtaccatgacgagtgttcttatagcatttg

SEQ ID NO: 50421 - DNA, 50 bp, synthetic construct
  source 1..50: mol_type = other DNA
aatgtttgatttttttcacattgagctttaaaagtaaaggtcttttgatt

SEQ ID NO: 50422 - DNA, 50 bp, synthetic construct
  source 1..50: mol_type = other DNA
agttcgcaccttaactcatgtggttcaccatttacgtcagcttgcgaaca

SEQ ID NO: 50423 - DNA, 50 bp, synthetic construct
  source 1..50: mol_type = other DNA
tgattggtatgagtcggacgccacatgtcgagagcgtaacggttcttgag

SEQ ID NO: 50424 - DNA, 50 bp, synthetic construct
  source 1..50: mol_type = other DNA
aagggttttacaaaaacgcctgtgaagccattcggaacctaatggcctga

SEQ ID NO: 50425 - DNA, 50 bp, synthetic construct
  source 1..50: mol_type = other DNA
ggttaataatttgtgttcctatcctagcgttgatacaaagagtgaaatag

SEQ ID NO: 50426 - DNA, 50 bp, synthetic construct
  source 1..50: mol_type = other DNA
aattgtttaaatgaaactatttcacagataacagtttcatttaaacaaat

SEQ ID NO: 50427 - DNA, 50 bp, synthetic construct
  source 1..50: mol_type = other DNA
tgtgtcattataataacacaagcacccccttgtgtcaagctaatgacaca

SEQ ID NO: 50428 - DNA, 50 bp, synthetic construct
  source 1..50: mol_type = other DNA
ttttatcaaacctctactaccgaggttacggtagtcgcggttaaagggcg

SEQ ID NO: 50429 - DNA, 50 bp, synthetic construct
  source 1..50: mol_type = other DNA
tttacaggtagtacatttagaaacacgtttctaaatacaccctattttgg

SEQ ID NO: 50430 - DNA, 50 bp, synthetic construct
  source 1..50: mol_type = other DNA
ctattagtatagaagaaagctctcagtgtgtcgcactgctcgtaaaagcc

SEQ ID NO: 50431 - DNA, 50 bp, synthetic construct
  source 1..50: mol_type = other DNA
tggttgatatctcgtttggacaatttattgtccaaactaatttctaagtc

SEQ ID NO: 50432 - DNA, 50 bp, synthetic construct
  source 1..50: mol_type = other DNA
gcttatacggcttcctgggactttggaaagaggacggaagccttacggga

SEQ ID NO: 50433 - DNA, 50 bp, synthetic construct
  source 1..50: mol_type = other DNA
gtcgtgaattaatcgaaagggcttccaaatcgttctctttagaacaaatg

SEQ ID NO: 50434 - DNA, 50 bp, synthetic construct
  source 1..50: mol_type = other DNA
tagggactcgggcttttggaccgaaaggcggacgaaagcgatgaatatga

SEQ ID NO: 50435 - DNA, 50 bp, synthetic construct
  source 1..50: mol_type = other DNA
tgtgtctattttgtattgtcttgcgagaaagaagactcaagatggactcg

SEQ ID NO: 50436 - DNA, 50 bp, synthetic construct
  source 1..50: mol_type = other DNA
ggtagcgtcgaaaattaccgggtattaaccctgtatttttctgaggtgcc

SEQ ID NO: 50437 - DNA, 50 bp, synthetic construct
  source 1..50: mol_type = other DNA
gcgtgaaaatgagtcttacaggttaatacctgtaacgccaaggctcacag

SEQ ID NO: 50438 - DNA, 50 bp, synthetic construct
  source 1..50: mol_type = other DNA
tattgtgtttgagtgacagcggaacatccgtacgacactcaaatgcaata

SEQ ID NO: 50439 - DNA, 50 bp, synthetic construct
  source 1..50: mol_type = other DNA
tttgttttacatataagcacctttgctaaggtgcttaataagttccttaa

SEQ ID NO: 50440 - DNA, 50 bp, synthetic construct
  source 1..50: mol_type = other DNA
agtgtagagggtgaatggttgtactgatacaaatatacaccctatacaca

SEQ ID NO: 50441 - DNA, 50 bp, synthetic construct
  source 1..50: mol_type = other DNA
gctttgttctgttctaatattggattaccagttagtgaaaatgaaaaagc

SEQ ID NO: 50442 - DNA, 50 bp, synthetic construct
  source 1..50: mol_type = other DNA
aattctttttttacctctcctttttgtaaaggaggttattttcatgaata

SEQ ID NO: 50443 - DNA, 50 bp, synthetic construct
  source 1..50: mol_type = other DNA
cagcaatatcattcactcatgataccgtatcataaataatgatatttaag

SEQ ID NO: 50444 - DNA, 50 bp, synthetic construct
  source 1..50: mol_type = other DNA
ccctaatctacctcatagtgtatttaaatacaccatctaaaacgatacaa

SEQ ID NO: 50445 - DNA, 50 bp, synthetic construct
  source 1..50: mol_type = other DNA
aattttagttattgggggttgactatcatgtacccatcaacacacgagag

SEQ ID NO: 50446 - DNA, 50 bp, synthetic construct
  source 1..50: mol_type = other DNA
agatgaacatctaaagaaaaccgaattcggcattgtagcattagccataa

SEQ ID NO: 50447 - DNA, 50 bp, synthetic construct
  source 1..50: mol_type = other DNA
agttccactgccgtttcaaataaaagctcatctgaacctgcaggatgcct

SEQ ID NO: 50448 - DNA, 50 bp, synthetic construct
  source 1..50: mol_type = other DNA
gattgatgaatttgccgatctttaattaaaatttcagcgtttcccaaaga

SEQ ID NO: 50449 - DNA, 50 bp, synthetic construct
  source 1..50: mol_type = other DNA
gataactaaggaatgaaatctcccccggccgttttcaatccggtatccat

SEQ ID NO: 50450 - DNA, 50 bp, synthetic construct
  source 1..50: mol_type = other DNA
aaacaaaattagcccttgaaacggaacttttgaaagggcttattttttac

SEQ ID NO: 50451 - DNA, 50 bp, synthetic construct
  source 1..50: mol_type = other DNA
acccgctgtggtgggcgcagatagcgctattccagatcaaaagtcaaggc

SEQ ID NO: 50452 - DNA, 50 bp, synthetic construct
  source 1..50: mol_type = other DNA
ggttcttcctcataccggaggttggccatatcaaactttgatatgtaccc

SEQ ID NO: 50453 - DNA, 50 bp, synthetic construct
  source 1..50: mol_type = other DNA
cagcgcctctgtgcgcttttcggggttttatctctagaaccccggcgctt

SEQ ID NO: 50454 - DNA, 50 bp, synthetic construct
  source 1..50: mol_type = other DNA
aaaaatttagttattggggtttacaatgcccccacaataacacgaggggg

SEQ ID NO: 50455 - DNA, 50 bp, synthetic construct
  source 1..50: mol_type = other DNA
ccaccagcggtgcggaacagcttgggcaggcttgtccacgatgctggtct

SEQ ID NO: 50456 - DNA, 50 bp, synthetic construct
  source 1..50: mol_type = other DNA
tattgtgggtacatgatattagggaacccgaacgcagtcaacccccaata

SEQ ID NO: 50457 - DNA, 50 bp, synthetic construct
  source 1..50: mol_type = other DNA
aaccgtggtcacaagggctcctcttctgcaaggcgctgcgggtcacggag

SEQ ID NO: 50458 - DNA, 50 bp, synthetic construct
  source 1..50: mol_type = other DNA
tgtataccagataagtagttagattcatctatgtacctatgtggtataca

SEQ ID NO: 50459 - DNA, 50 bp, synthetic construct
  source 1..50: mol_type = other DNA
ttacctatcttccatttattcctattttttataaaatttgaaagaggtac

SEQ ID NO: 50460 - DNA, 50 bp, synthetic construct
  source 1..50: mol_type = other DNA
ttcctatgttattacacactatatatccttatggttgattatatttataa

SEQ ID NO: 50461 - DNA, 50 bp, synthetic construct
  source 1..50: mol_type = other DNA
gggcgtacttactataccaattgggaacagttagtgtataatgtacgcca

SEQ ID NO: 50462 - DNA, 50 bp, synthetic construct
  source 1..50: mol_type = other DNA
catgaaaaaagttatcacgatagaactctattagtatatcttcggtgcta

SEQ ID NO: 50463 - DNA, 50 bp, synthetic construct
  source 1..50: mol_type = other DNA
atttgtgtacttaatgcgcagtctatattcaagagaaaaagtataggtga

SEQ ID NO: 50464 - DNA, 50 bp, synthetic construct
  source 1..50: mol_type = other DNA
atgtccttaatcatattctggaaacttttgtaatatagtgataaatatct

SEQ ID NO: 50465 - DNA, 50 bp, synthetic construct
  source 1..50: mol_type = other DNA
tttagtttctcatttcctctcactggacggagaagaaacgagatgcaaaa

SEQ ID NO: 50466 - DNA, 50 bp, synthetic construct
  source 1..50: mol_type = other DNA
taaaatccttcagcgtgtgctttgtgaaaaccgcacatgaaaggataagt

SEQ ID NO: 50467 - DNA, 50 bp, synthetic construct
  source 1..50: mol_type = other DNA
tttaattaattttgtgaaatctcagaattgactcccgaaaatatagatca

SEQ ID NO: 50468 - DNA, 50 bp, synthetic construct
  source 1..50: mol_type = other DNA
ccctaatcaaccttatagtgtatttaaatacaccatctaaagcgatacaa

SEQ ID NO: 50469 - DNA, 50 bp, synthetic construct
  source 1..50: mol_type = other DNA
taattaacaggtctcttagaaaaccggcattgtagcattagccataacgt

SEQ ID NO: 50470 - DNA, 50 bp, synthetic construct
  source 1..50: mol_type = other DNA
ttgtatcgctttagatggtgtatttaaatacactatgaggttgattaggg

SEQ ID NO: 50471 - DNA, 50 bp, synthetic construct
  source 1..50: mol_type = other DNA
ttaacaggtttcttaaaaaaccgaattcggcattgtagcattagccataa

SEQ ID NO: 50472 - DNA, 50 bp, synthetic construct
  source 1..50: mol_type = other DNA
ttatggctaatgctacaatgccgaattcggttttctaagagagctgttaa

SEQ ID NO: 50473 - DNA, 50 bp, synthetic construct
  source 1..50: mol_type = other DNA
gccctgccgatgcgccagcgccatcaagcgcctcgaggccgcggcagcgc

SEQ ID NO: 50474 - DNA, 50 bp, synthetic construct
  source 1..50: mol_type = other DNA
gtgcgtgtttagctatgtaaaagcactagtattcttgccttaacactcat

SEQ ID NO: 50475 - DNA, 50 bp, synthetic construct
  source 1..50: mol_type = other DNA
ttccttaatcctcctttttctttctgatatatagacactaccggaaggag

SEQ ID NO: 50476 - DNA, 50 bp, synthetic construct
  source 1..50: mol_type = other DNA
tttgcccaatctggcattttctctggcgagaaaaagccagagaatccatg

SEQ ID NO: 50477 - DNA, 50 bp, synthetic construct
  source 1..50: mol_type = other DNA
atggtaataacttacgcgattttttccataaggtaaaaagatattatcat

SEQ ID NO: 50478 - DNA, 50 bp, synthetic construct
  source 1..50: mol_type = other DNA
tgatgaaaaagtccttgacttttcgtatgctctaaaagacttcttaatca

SEQ ID NO: 50479 - DNA, 50 bp, synthetic construct
  source 1..50: mol_type = other DNA
atacgtgtttagctatgtaagattaccagtattcttgccttaacactcat

SEQ ID NO: 50480 - DNA, 50 bp, synthetic construct
  source 1..50: mol_type = other DNA
cagaaagattatatgtatattgtctagaagacatataattattctgctga

SEQ ID NO: 50481 - DNA, 50 bp, synthetic construct
  source 1..50: mol_type = other DNA
tcatcggctcggccttgagcccttccgcctgatcaaggccgccgcgtagt

SEQ ID NO: 50482 - DNA, 50 bp, synthetic construct
  source 1..50: mol_type = other DNA
acgtatcagagtctgtagagaacctttattctacacatagtctcatacgt

SEQ ID NO: 50483 - DNA, 50 bp, synthetic construct
  source 1..50: mol_type = other DNA
aggttccagttctcagtttcgttgccactcccgtccaaaacttggaacct

SEQ ID NO: 50484 - DNA, 50 bp, synthetic construct
  source 1..50: mol_type = other DNA
atgtacgtgtttatctatgtaaaagccttaacactcatatcattgttctc

SEQ ID NO: 50485 - DNA, 50 bp, synthetic construct
  source 1..50: mol_type = other DNA
atgaccgccgactcaacgtcccgagacaaggaaaagcagtccatggtgat

SEQ ID NO: 50486 - DNA, 50 bp, synthetic construct
  source 1..50: mol_type = other DNA
tttagtacctcatttcctctcgttggaagaagaggaaacgagatactaaa

SEQ ID NO: 50487 - DNA, 50 bp, synthetic construct
  source 1..50: mol_type = other DNA
aaacaggaaaagcgaacattttagttgcaatccgtgcttttcaaagaaag

SEQ ID NO: 50488 - DNA, 50 bp, synthetic construct
  source 1..50: mol_type = other DNA
gcccgaatggtggagctgaggggagtacccgccaactccattatccggat

SEQ ID NO: 50489 - DNA, 50 bp, synthetic construct
  source 1..50: mol_type = other DNA
catggctttgaatgattctcgaagtttttgtatcaggaggtacagccatg

SEQ ID NO: 50490 - DNA, 50 bp, synthetic construct
  source 1..50: mol_type = other DNA
gttgatgggtttatgatattagggaacccaaacgtagtcaacccgcaata

SEQ ID NO: 50491 - DNA, 50 bp, synthetic construct
  source 1..50: mol_type = other DNA
tgtacctcttttttgataaaatgggtatctttgtttgcattcatatctta

SEQ ID NO: 50492 - DNA, 50 bp, synthetic construct
  source 1..50: mol_type = other DNA
gaggatgcaatgccggagtcggaattacatgatgcaggatagaactgctc

SEQ ID NO: 50493 - DNA, 50 bp, synthetic construct
  source 1..50: mol_type = other DNA
ctaataagacaaagacatctacggttacgcagctgtcttggggttagatc

SEQ ID NO: 50494 - DNA, 50 bp, synthetic construct
  source 1..50: mol_type = other DNA
tgtaatgacataaaacatctatgtatacatattctttatcggacataatg

SEQ ID NO: 50495 - DNA, 50 bp, synthetic construct
  source 1..50: mol_type = other DNA
agcggccagggcatgggagagccctgctgctcctgctgcccctgggcgtg

SEQ ID NO: 50496 - DNA, 50 bp, synthetic construct
  source 1..50: mol_type = other DNA
gttaaactataatcgttttgtcattaatgacaaaactaaaaacacttaac

SEQ ID NO: 50497 - DNA, 50 bp, synthetic construct
  source 1..50: mol_type = other DNA
cctgcccgaccggtacaggtccaaaaaatgagcttttacggtccagcatc

SEQ ID NO: 50498 - DNA, 50 bp, synthetic construct
  source 1..50: mol_type = other DNA
gtttggttaattgaataagtaattaaggtgctttatcgtattccctaaac

SEQ ID NO: 50499 - DNA, 50 bp, synthetic construct
  source 1..50: mol_type = other DNA
gatatgagtgttaaggcaagaatacttttacatggctaaacacgcacatt

SEQ ID NO: 50500 - DNA, 50 bp, synthetic construct
  source 1..50: mol_type = other DNA
tctcctatataatcagtaatggtatcagccaccaaatattatatttctat

SEQ ID NO: 50501 - DNA, 50 bp, synthetic construct
  source 1..50: mol_type = other DNA
ttaggccataagctgtgcatacatcgaaaccgtcacaccttaaaatcgca

SEQ ID NO: 50502 - DNA, 50 bp, synthetic construct
  source 1..50: mol_type = other DNA
atagtgagcaattttgaaaacgatatgattttttcaaaactaaataaaat

SEQ ID NO: 50503 - DNA, 50 bp, synthetic construct
  source 1..50: mol_type = other DNA
atgcatggtttaacctcctataaatcaggcaccgaagttaaatcaatcag

SEQ ID NO: 50504 - DNA, 50 bp, synthetic construct
  source 1..50: mol_type = other DNA
tttaacaggtctcttagaaaccgaattcggcattgtagcattagccataa

SEQ ID NO: 50505 - DNA, 50 bp, synthetic construct
  source 1..50: mol_type = other DNA
tgtgtgttaggtcagttttatgacttttcgttaaactgaccttatggcga

SEQ ID NO: 50506 - DNA, 50 bp, synthetic construct
  source 1..50: mol_type = other DNA
attactagacatgtttcaagagtgtacacctatgagaagggcgagcggat

SEQ ID NO: 50507 - DNA, 50 bp, synthetic construct
  source 1..50: mol_type = other DNA
tggctgtaatcctgcaccaccgagacctcaattgtcgagaaagtaagcca

SEQ ID NO: 50508 - DNA, 50 bp, synthetic construct
  source 1..50: mol_type = other DNA
atttgtttgtttactatagcggctatgctaagttatacaaacaaaataac

SEQ ID NO: 50509 - DNA, 50 bp, synthetic construct
  source 1..50: mol_type = other DNA
cacagggtgcataaaaaagtgaagattttcacttcctaaaacacccttta

SEQ ID NO: 50510 - DNA, 50 bp, synthetic construct
  source 1..50: mol_type = other DNA
aagtgcggtggctacatgatcggaatgtggaacggaaagccaatttcatt

SEQ ID NO: 50511 - DNA, 50 bp, synthetic construct
  source 1..50: mol_type = other DNA
tttgaatgacttctattttcgtcctagaataactatttctatcctttaaa

SEQ ID NO: 50512 - DNA, 50 bp, synthetic construct
  source 1..50: mol_type = other DNA
atcctggatgggcattgttttgcgcgaacacaacaatccagtgcctcccg

SEQ ID NO: 50513 - DNA, 50 bp, synthetic construct
  source 1..50: mol_type = other DNA
tacggcatttcccccaaaaactgcgagctgtttttagcagaagaaccgca

SEQ ID NO: 50514 - DNA, 50 bp, synthetic construct
  source 1..50: mol_type = other DNA
gtatacgaaaggacggcataccatgaatggtagatcttcatagcgtgtac

SEQ ID NO: 50515 - DNA, 50 bp, synthetic construct
  source 1..50: mol_type = other DNA
gacgttggttttttcagcttctgttaacagaccctgtgaagttgattaag

SEQ ID NO: 50516 - DNA, 50 bp, synthetic construct
  source 1..50: mol_type = other DNA
tagagaaatactataaaataaaaagttttttatttaataatattaatttc

SEQ ID NO: 50517 - DNA, 50 bp, synthetic construct
  source 1..50: mol_type = other DNA
gagttacttgtatgatcaattccttatggtccatattatagatgtaaaga

SEQ ID NO: 50518 - DNA, 50 bp, synthetic construct
  source 1..50: mol_type = other DNA
tcatatcatggtagcaaaatctcttaggagatggttctatatctataaaa

SEQ ID NO: 50519 - DNA, 50 bp, synthetic construct
  source 1..50: mol_type = other DNA
tctaaagaaaaccgaatagactttattgtagctattcggcattgtagcat

SEQ ID NO: 50520 - DNA, 50 bp, synthetic construct
  source 1..50: mol_type = other DNA
ggcgggtattagaattgaatggcaaatgacttactaaccaatgcccctat

SEQ ID NO: 50521 - DNA, 50 bp, synthetic construct
  source 1..50: mol_type = other DNA
acgtttttattgcgaagccgcatccggtattgtcttcagtataataggtt

SEQ ID NO: 50522 - DNA, 50 bp, synthetic construct
  source 1..50: mol_type = other DNA
gaacaatgatatgagtgttaaggcaagtggtaacacttggggaggtgtca

SEQ ID NO: 50523 - DNA, 50 bp, synthetic construct
  source 1..50: mol_type = other DNA
tagccgaattttatattatttaaaaatgtaatggttttaggatttggtag

SEQ ID NO: 50524 - DNA, 50 bp, synthetic construct
  source 1..50: mol_type = other DNA
ccctctctcgtgttgatgggtttatgtcaacccacaataactaaaatttt

SEQ ID NO: 50525 - DNA, 50 bp, synthetic construct
  source 1..50: mol_type = other DNA
ccgggctttgaagagccgtgggcagcagcatgaaagcggacaaagcactg

SEQ ID NO: 50526 - DNA, 50 bp, synthetic construct
  source 1..50: mol_type = other DNA
atatcggatgaagtgctgaagcaagtttgcaggagggaggaatcaaatat

SEQ ID NO: 50527 - DNA, 50 bp, synthetic construct
  source 1..50: mol_type = other DNA
gggccgacgcagccatcagccgaaacaaaaactgatgcctgcgtaggaga

SEQ ID NO: 50528 - DNA, 50 bp, synthetic construct
  source 1..50: mol_type = other DNA
ggcgcggtgctatgtatcccgcatcgagggacaataaatagcaccgccgt

SEQ ID NO: 50529 - DNA, 50 bp, synthetic construct
  source 1..50: mol_type = other DNA
gaaatccgagcactacaatctcaaattaaagattggccaatgtgtatcgt

SEQ ID NO: 50530 - DNA, 50 bp, synthetic construct
  source 1..50: mol_type = other DNA
gggctcctttccttgttggaatggagccaagcactgcagttagactcatt

SEQ ID NO: 50531 - DNA, 50 bp, synthetic construct
  source 1..50: mol_type = other DNA
aattacaggcaacatatagtttttcccgaaactagaaagctttgttaaaa

SEQ ID NO: 50532 - DNA, 50 bp, synthetic construct
  source 1..50: mol_type = other DNA
attcttttgtttcttcaatattcttgccaataaatacaaaaataaagatt

SEQ ID NO: 50533 - DNA, 50 bp, synthetic construct
  source 1..50: mol_type = other DNA
ttcgccctgcagagtcgactgcggtctatcagtcacagattgtgggcgaa

SEQ ID NO: 50534 - DNA, 50 bp, synthetic construct
  source 1..50: mol_type = other DNA
tcctggcgctacttcagcccggaggccggtgggcttaaccagtgagggga

SEQ ID NO: 50535 - DNA, 50 bp, synthetic construct
  source 1..50: mol_type = other DNA
agaattgaacttgatgaagaaaggggtttttctcattcaacttcaatttc

SEQ ID NO: 50536 - DNA, 50 bp, synthetic construct
  source 1..50: mol_type = other DNA
tacctcttgttaagaactaatattttcaaagaatacctttacttgacctg

SEQ ID NO: 50537 - DNA, 50 bp, synthetic construct
  source 1..50: mol_type = other DNA
gtatcattaactaaaaatggagacctgtcgagaagtttcattcttgactt

SEQ ID NO: 50538 - DNA, 50 bp, synthetic construct
  source 1..50: mol_type = other DNA
catgggtggaggactggtgattaaaattcatccatagatgcccggtcaca

SEQ ID NO: 50539 - DNA, 50 bp, synthetic construct
  source 1..50: mol_type = other DNA
cttctgattttgatttgtgatataataaaatgacaaatcaaaaagaaaaa

SEQ ID NO: 50540 - DNA, 50 bp, synthetic construct
  source 1..50: mol_type = other DNA
atactaaaaaatgaaaatatgaacgaattcatatattcctgctcctgctt

SEQ ID NO: 50541 - DNA, 50 bp, synthetic construct
  source 1..50: mol_type = other DNA
gttcataattcatacctccaaaatttctactttgtcctttaattctgata

SEQ ID NO: 50542 - DNA, 50 bp, synthetic construct
  source 1..50: mol_type = other DNA
gaaaatgctctaagtgactgcttcactgtgtcgaagaacttttccaagtc

SEQ ID NO: 50543 - DNA, 50 bp, synthetic construct
  source 1..50: mol_type = other DNA
tggacggactctgtaccgggttctacaggaacggatatgggatgagaaca

SEQ ID NO: 50544 - DNA, 50 bp, synthetic construct
  source 1..50: mol_type = other DNA
gcggtgaggagcttttctgtgcatataaaagaaatcagcttctgaagcgg

SEQ ID NO: 50545 - DNA, 50 bp, synthetic construct
  source 1..50: mol_type = other DNA
taaagataaaataatatccctagtatttaggaactatttgtaaaccagta

SEQ ID NO: 50546 - DNA, 50 bp, synthetic construct
  source 1..50: mol_type = other DNA
caggaaaaaatgtgcggtatgagatgggatatcgcgcacgtttttctact

SEQ ID NO: 50547 - DNA, 50 bp, synthetic construct
  source 1..50: mol_type = other DNA
aaagtagtgtaaacaccaaaaaacactgttagcgcaatttacactacttt

SEQ ID NO: 50548 - DNA, 50 bp, synthetic construct
  source 1..50: mol_type = other DNA
gtcttcattggtatatctgcgattagaatcgcagctttacataggatatt

SEQ ID NO: 50549 - DNA, 50 bp, synthetic construct
  source 1..50: mol_type = other DNA
agttgacggttgtgctgtagttgatgagtacatcaaggccgccgttcctt

SEQ ID NO: 50550 - DNA, 50 bp, synthetic construct
  source 1..50: mol_type = other DNA
catcacgaattttctgcagattgttaacactttcgagaaaatatcggaaa

SEQ ID NO: 50551 - DNA, 50 bp, synthetic construct
  source 1..50: mol_type = other DNA
tcatgggatttgtcatttttacatttttgtaaagctgtttgagcttatca

SEQ ID NO: 50552 - DNA, 50 bp, synthetic construct
  source 1..50: mol_type = other DNA
aatacgtatactgtcggtcaaggcaagccctatccgactttctacgtaat

SEQ ID NO: 50553 - DNA, 50 bp, synthetic construct
  source 1..50: mol_type = other DNA
gacacctgttcaaaggtcggcggctcgctgtcttgatttgaacactcgtc

SEQ ID NO: 50554 - DNA, 50 bp, synthetic construct
  source 1..50: mol_type = other DNA
tttagtacctcgttttctctcgttggaagaagaagaaacgagatacaaaa

SEQ ID NO: 50555 - DNA, 50 bp, synthetic construct
  source 1..50: mol_type = other DNA
gttgttttcattgtatttgtacctctgacaagaaattccgaataaataag

SEQ ID NO: 50556 - DNA, 50 bp, synthetic construct
  source 1..50: mol_type = other DNA
tattaggggtttactaatctcgggttgcctaatatcataaacccatcaac

SEQ ID NO: 50557 - DNA, 50 bp, synthetic construct
  source 1..50: mol_type = other DNA
aacaatccttatgacagcccacattttgtagggatttcataaggatactt

SEQ ID NO: 50558 - DNA, 50 bp, synthetic construct
  source 1..50: mol_type = other DNA
ggttatttcttaatatccttttgtttagttaaagatatgaaccctcatta

SEQ ID NO: 50559 - DNA, 50 bp, synthetic construct
  source 1..50: mol_type = other DNA
cttaagatggtgtatttaaacgtgtcaaggtctaaatgcacctgttattt

SEQ ID NO: 50560 - DNA, 50 bp, synthetic construct
  source 1..50: mol_type = other DNA
ctgtaaagcacttgattgtgatataaagccaccaatcaaggaagtaacac

SEQ ID NO: 50561 - DNA, 50 bp, synthetic construct
  source 1..50: mol_type = other DNA
agttatatttaagagtaactaaactagtttttttatttttttctaatatt

SEQ ID NO: 50562 - DNA, 50 bp, synthetic construct
  source 1..50: mol_type = other DNA
gttgatgggtacatgatattaggcaacccaaacgtagtcaacccccaata

SEQ ID NO: 50563 - DNA, 50 bp, synthetic construct
  source 1..50: mol_type = other DNA
acatttttatttacaagatttttcttaagcaactttcaaattaaaaaaat

SEQ ID NO: 50564 - DNA, 50 bp, synthetic construct
  source 1..50: mol_type = other DNA
taatattattggaattaataaaaattcttttacttgttctgctgctattt

SEQ ID NO: 50565 - DNA, 50 bp, synthetic construct
  source 1..50: mol_type = other DNA
ctgtgtttggggaatagatattaggaactttggtaaaatccctgacgcta

SEQ ID NO: 50566 - DNA, 50 bp, synthetic construct
  source 1..50: mol_type = other DNA
tgcgatactaatggtaacccaaccaatgaagagggcgtgatagtatcgca

SEQ ID NO: 50567 - DNA, 50 bp, synthetic construct
  source 1..50: mol_type = other DNA
ttgggtatctcgtttcttcttcttccaacgagagaaaacgaggaactaaa

SEQ ID NO: 50568 - DNA, 50 bp, synthetic construct
  source 1..50: mol_type = other DNA
attactgttttatccagtgtcgccatgcaggggctggataaaacagtaat

SEQ ID NO: 50569 - DNA, 50 bp, synthetic construct
  source 1..50: mol_type = other DNA
gcttttaagagcagagtaacacactccttatatactatagaacgaaataa

SEQ ID NO: 50570 - DNA, 50 bp, synthetic construct
  source 1..50: mol_type = other DNA
aggttgaaaatttatgttcacatagtagtgttgctacgtcgaaaataatg

SEQ ID NO: 50571 - DNA, 50 bp, synthetic construct
  source 1..50: mol_type = other DNA
tgttgcacttttatacaccttgcttctgctatagctaaaaaagtgcaact

SEQ ID NO: 50572 - DNA, 50 bp, synthetic construct
  source 1..50: mol_type = other DNA
tatttgtacagtaatttactgttaatatactgctttttactgttatgatt

SEQ ID NO: 50573 - DNA, 50 bp, synthetic construct
  source 1..50: mol_type = other DNA
taggtgcgatactaatagaaacccaagagtgggtgatagcatcgcaatcc

SEQ ID NO: 50574 - DNA, 50 bp, synthetic construct
  source 1..50: mol_type = other DNA
acaattataaccaaactgcacacctacgtgtgcatattgctattaaatgt

SEQ ID NO: 50575 - DNA, 50 bp, synthetic construct
  source 1..50: mol_type = other DNA
acaggtatgttctcatagtgtatttaaatacactacctaaagcgatacaa

SEQ ID NO: 50576 - DNA, 50 bp, synthetic construct
  source 1..50: mol_type = other DNA
aattatgtcagagaataacatgtatttacatctataataatcaattggtt

SEQ ID NO: 50577 - DNA, 50 bp, synthetic construct
  source 1..50: mol_type = other DNA
aaaaatactagttgttttcatcaatattgatacaaatctagaattttttg

SEQ ID NO: 50578 - DNA, 50 bp, synthetic construct
  source 1..50: mol_type = other DNA
aagacgttaattgaaaaccacatcatgatgcggttttttagcgcctttct

SEQ ID NO: 50579 - DNA, 50 bp, synthetic construct
  source 1..50: mol_type = other DNA
tgttgtgttatagtgttggtaaacattattaccaacactattacaagttg

SEQ ID NO: 50580 - DNA, 50 bp, synthetic construct
  source 1..50: mol_type = other DNA
ccttcgtaaaagtggtattcgaggtttgaaagatacttctttgacttcgc

SEQ ID NO: 50581 - DNA, 50 bp, synthetic construct
  source 1..50: mol_type = other DNA
cagatacctgattatccacgatacgcttttggtggcaggaatggttatca

SEQ ID NO: 50582 - DNA, 50 bp, synthetic construct
  source 1..50: mol_type = other DNA
cattgcataatgaaacatacgatacatattgtttattacaatatgcaaca

SEQ ID NO: 50583 - DNA, 50 bp, synthetic construct
  source 1..50: mol_type = other DNA
cattgtcctattatcaaaacagaatgttctgtcatgataataggacgctt

SEQ ID NO: 50584 - DNA, 50 bp, synthetic construct
  source 1..50: mol_type = other DNA
agaaaatatcatttactcatgataccataccacaaataatgatattttta

SEQ ID NO: 50585 - DNA, 50 bp, synthetic construct
  source 1..50: mol_type = other DNA
tgtaaccccccatgtgcattgcaaacagcttcttttcttccggtgtcacc

SEQ ID NO: 50586 - DNA, 50 bp, synthetic construct
  source 1..50: mol_type = other DNA
tgaccgtgcgagactagcaggcgagctcatcctgatggaacggccggtca

SEQ ID NO: 50587 - DNA, 50 bp, synthetic construct
  source 1..50: mol_type = other DNA
aaattgacttctgtgacagtgttcttcgtctatgtaacacttgtcaatga

SEQ ID NO: 50588 - DNA, 50 bp, synthetic construct
  source 1..50: mol_type = other DNA
aattcatttaatttttttatcttgtactcagtaaaaataattcaaaaaat

SEQ ID NO: 50589 - DNA, 50 bp, synthetic construct
  source 1..50: mol_type = other DNA
cgtgaaccaaataataaatccattctgaagaatttgtcgttccactcgac

SEQ ID NO: 50590 - DNA, 50 bp, synthetic construct
  source 1..50: mol_type = other DNA
tgtttcatctttttttggcaatataataaaactaaaaaaacgatgttgaa

SEQ ID NO: 50591 - DNA, 50 bp, synthetic construct
  source 1..50: mol_type = other DNA
gaaatgtatttatgcaaaacatcatcgtatgttttcatttcagtcagctc

SEQ ID NO: 50592 - DNA, 50 bp, synthetic construct
  source 1..50: mol_type = other DNA
aatcttgtcatgtcgaggcacgtggagacagtagcattgctcacaagtaa

SEQ ID NO: 50593 - DNA, 50 bp, synthetic construct
  source 1..50: mol_type = other DNA
ggtgttggaccgttggttcacgggtgcccatgaaccaacggtgcaacacc

SEQ ID NO: 50594 - DNA, 50 bp, synthetic construct
  source 1..50: mol_type = other DNA
tattatagcaccacctttaaaaaaggagcttctgggactgcgctttaaaa

SEQ ID NO: 50595 - DNA, 50 bp, synthetic construct
  source 1..50: mol_type = other DNA
tctctatatgtccttttcataaatactactatgataacaacaaataaagt

SEQ ID NO: 50596 - DNA, 50 bp, synthetic construct
  source 1..50: mol_type = other DNA
aaagcccaaactagccattatttctggagataacctctcatgatgtcttt

SEQ ID NO: 50597 - DNA, 50 bp, synthetic construct
  source 1..50: mol_type = other DNA
ataaacaaggtccaggtaacagctgatgtcttttcttgtacctattttat

SEQ ID NO: 50598 - DNA, 50 bp, synthetic construct
  source 1..50: mol_type = other DNA
gcgtacatatttatgaccttcaccattgtggtgggtttgagcttgggatt

SEQ ID NO: 50599 - DNA, 50 bp, synthetic construct
  source 1..50: mol_type = other DNA
ccttttttgataaaataggtacaagattttatcatttttctcgtccaact

SEQ ID NO: 50600 - DNA, 50 bp, synthetic construct
  source 1..50: mol_type = other DNA
tatcatataattgtcatttgccaactttgacaacatcttgtaatttgatc

SEQ ID NO: 50601 - DNA, 50 bp, synthetic construct
  source 1..50: mol_type = other DNA
ataaaatgggtacaagaaaagacatcagctgtcaccttaaccttgtttat

SEQ ID NO: 50602 - DNA, 50 bp, synthetic construct
  source 1..50: mol_type = other DNA
agctactttatttgttgttatcatagatgagtgtcttttctatcttagca

SEQ ID NO: 50603 - DNA, 50 bp, synthetic construct
  source 1..50: mol_type = other DNA
tagtgaagacgtattaccgaaaactagtttcgtgtggtaagaaagttata

SEQ ID NO: 50604 - DNA, 50 bp, synthetic construct
  source 1..50: mol_type = other DNA
ctgtacgttccaggaccgtaacagacatgccacgagctgagttggtaaat

SEQ ID NO: 50605 - DNA, 50 bp, synthetic construct
  source 1..50: mol_type = other DNA
gtgtaaacaattaactgtattatggctataatacagtcatatgtttacaa

SEQ ID NO: 50606 - DNA, 50 bp, synthetic construct
  source 1..50: mol_type = other DNA
ttgtaaacatatgactgtattatagctataatacggttaattgtttacac

SEQ ID NO: 50607 - DNA, 50 bp, synthetic construct
  source 1..50: mol_type = other DNA
gaggtaattttttcattataatctggtcgctccggatcaaatatcaatcg

SEQ ID NO: 50608 - DNA, 50 bp, synthetic construct
  source 1..50: mol_type = other DNA
ctcatagtgtatttagggaattaataatgggtccctaaacacatcatttt

SEQ ID NO: 50609 - DNA, 50 bp, synthetic construct
  source 1..50: mol_type = other DNA
tcagtagcgcttgttaggattaatagcatcctcataacaagcccaactgc

SEQ ID NO: 50610 - DNA, 50 bp, synthetic construct
  source 1..50: mol_type = other DNA
tggaatatatgtaatatctgtttgacagtagggttattacattttttagt

SEQ ID NO: 50611 - DNA, 50 bp, synthetic construct
  source 1..50: mol_type = other DNA
tcatttttttcattttaaaaatttacaaattcaatgaaaacaatgaataa

SEQ ID NO: 50612 - DNA, 50 bp, synthetic construct
  source 1..50: mol_type = other DNA
ttttcccatttcaaccgaatcacaaagctgtttccaccaaaatgggaaca

SEQ ID NO: 50613 - DNA, 50 bp, synthetic construct
  source 1..50: mol_type = other DNA
gagaccagaacggacctccgctaccattagaacagacgacagttccggac

SEQ ID NO: 50614 - DNA, 50 bp, synthetic construct
  source 1..50: mol_type = other DNA
tgttcccattttggtggaaacagctttgtgattcggttgaaatgggaaaa

SEQ ID NO: 50615 - DNA, 50 bp, synthetic construct
  source 1..50: mol_type = other DNA
tgtctgcgctacagattccacccaattgcacaactcgcccaagccccgat

SEQ ID NO: 50616 - DNA, 50 bp, synthetic construct
  source 1..50: mol_type = other DNA
aggcgacgtcacttgttcccattttgaaatgggaaaaggtaatgtgcgga

SEQ ID NO: 50617 - DNA, 50 bp, synthetic construct
  source 1..50: mol_type = other DNA
tgtgtgcgttccagattccacccaattgcacaactcacccaagccccgat

SEQ ID NO: 50618 - DNA, 50 bp, synthetic construct
  source 1..50: mol_type = other DNA
ttattcccattttggtggaaacagttgtgattcatcagaaatgggaaaaa

SEQ ID NO: 50619 - DNA, 50 bp, synthetic construct
  source 1..50: mol_type = other DNA
tatgtcaataatgtaaaaaattcccgggatatgtttccattattgacatg

SEQ ID NO: 50620 - DNA, 50 bp, synthetic construct
  source 1..50: mol_type = other DNA
gtccgttcaagactatagtgcaattaatggaaccatcgtatcatacgatt

SEQ ID NO: 50621 - DNA, 50 bp, synthetic construct
  source 1..50: mol_type = other DNA
tgcaactatttgaaaccactaggagtacgaggtgtctttaaacagttatg

SEQ ID NO: 50622 - DNA, 50 bp, synthetic construct
  source 1..50: mol_type = other DNA
tccaattctatccaaaacctcatttaagtgaggtttttaataaaaaaaac

SEQ ID NO: 50623 - DNA, 50 bp, synthetic construct
  source 1..50: mol_type = other DNA
ttttcaatattattcataactatttaaatagttatggttactataagaat

SEQ ID NO: 50624 - DNA, 50 bp, synthetic construct
  source 1..50: mol_type = other DNA
tgtcgagggtttcatggtggaggcgatacgtgacctttaaaatccactac

SEQ ID NO: 50625 - DNA, 50 bp, synthetic construct
  source 1..50: mol_type = other DNA
cataactgtttaagtccaccccgaactcgcggtggttttaaactataact

SEQ ID NO: 50626 - DNA, 50 bp, synthetic construct
  source 1..50: mol_type = other DNA
tttttatttattggtctatatatagctgtgtgttgctaaaaaaaagataa

SEQ ID NO: 50627 - DNA, 50 bp, synthetic construct
  source 1..50: mol_type = other DNA
ggaattaaataatttacatacaacatgttgtatgtaattaagttaaacca

SEQ ID NO: 50628 - DNA, 50 bp, synthetic construct
  source 1..50: mol_type = other DNA
tacatacaacatgttgtgtgtaatgaaatataactaatatgttgtatgta

SEQ ID NO: 50629 - DNA, 50 bp, synthetic construct
  source 1..50: mol_type = other DNA
attatgtactttagtcaacagaaccattttctacatgagaagtttatatt

SEQ ID NO: 50630 - DNA, 50 bp, synthetic construct
  source 1..50: mol_type = other DNA
cttatctattgggtatgggtagcttaaactaaccactcaaaatatgttat

SEQ ID NO: 50631 - DNA, 50 bp, synthetic construct
  source 1..50: mol_type = other DNA
gtgtatcaatagaagggcctcttcaggattacacctttcttatgatacac

SEQ ID NO: 50632 - DNA, 50 bp, synthetic construct
  source 1..50: mol_type = other DNA
aacctcatagtgtatttagacattgacacgtttaaatacaccacctaaag

SEQ ID NO: 50633 - DNA, 50 bp, synthetic construct
  source 1..50: mol_type = other DNA
ggttaaaatgcagcggcgcaatgcgccgattgaggatcgccagattacgg

SEQ ID NO: 50634 - DNA, 50 bp, synthetic construct
  source 1..50: mol_type = other DNA
gtttggacaatagtacaccggttgagcctacaaggtagaatacattcaat

SEQ ID NO: 50635 - DNA, 50 bp, synthetic construct
  source 1..50: mol_type = other DNA
tattaatgttatgttctacaccctttaatggaatgaacataacttttttc

SEQ ID NO: 50636 - DNA, 50 bp, synthetic construct
  source 1..50: mol_type = other DNA
tttttttgttgtacttaaactataattattgattgagtacgacataaacc

SEQ ID NO: 50637 - DNA, 50 bp, synthetic construct
  source 1..50: mol_type = other DNA
ggtttatgtcgtactcaatcaataattatagtttaagtataacaaaaaaa

SEQ ID NO: 50638 - DNA, 50 bp, synthetic construct
  source 1..50: mol_type = other DNA
gcaacctatgaaaaaaagataaagcattttatcattttttaggaaatttt

SEQ ID NO: 50639 - DNA, 50 bp, synthetic construct
  source 1..50: mol_type = other DNA
caagttatcactatacattagacagaaagcaaatgtacagtgcataacta

SEQ ID NO: 50640 - DNA, 50 bp, synthetic construct
  source 1..50: mol_type = other DNA
agttataacgaaagtggttgcgggggcccgcaacgtcttttgttataact

SEQ ID NO: 50641 - DNA, 50 bp, synthetic construct
  source 1..50: mol_type = other DNA
aggtgtcttgatggtacatttccatcagagaatgtatcaatgagacactg

SEQ ID NO: 50642 - DNA, 50 bp, synthetic construct
  source 1..50: mol_type = other DNA
aaggttaagggtgtgtgttccgatgtaagactacaaaggaaacataccta

SEQ ID NO: 50643 - DNA, 50 bp, synthetic construct
  source 1..50: mol_type = other DNA
taatatacggactttttttgtagtacaaccatcccagcggaaagtatcag

SEQ ID NO: 50644 - DNA, 50 bp, synthetic construct
  source 1..50: mol_type = other DNA
tggaattatccagtacggcatatgcaagcgttactagtaggacatttcct

SEQ ID NO: 50645 - DNA, 50 bp, synthetic construct
  source 1..50: mol_type = other DNA
tattttttcttttgacatagcattaaattcgtgccattgaagaaaaaatt

SEQ ID NO: 50646 - DNA, 50 bp, synthetic construct
  source 1..50: mol_type = other DNA
tggtgcaattatagctccacgatggacattgtaaagaagtatatgcaccg

SEQ ID NO: 50647 - DNA, 50 bp, synthetic construct
  source 1..50: mol_type = other DNA
acccattcttgtagttatgcactgtatagtgataacttgcattttatggt

SEQ ID NO: 50648 - DNA, 50 bp, synthetic construct
  source 1..50: mol_type = other DNA
ggtattagcaagagcaaattgattttttctatttttattcggttaataat

SEQ ID NO: 50649 - DNA, 50 bp, synthetic construct
  source 1..50: mol_type = other DNA
tcctgttaacgatacgacccccttcgaattagtatggagggtggacagga

SEQ ID NO: 50650 - DNA, 50 bp, synthetic construct
  source 1..50: mol_type = other DNA
ctttaggtggtgtatttaaacgtgtcagggtctaaatacactatgagaac

SEQ ID NO: 50651 - DNA, 50 bp, synthetic construct
  source 1..50: mol_type = other DNA
tttagtttctcgattcgtctccgtccagtgagagaaaatgagggactaaa

SEQ ID NO: 50652 - DNA, 50 bp, synthetic construct
  source 1..50: mol_type = other DNA
ttgtttgtataagcataacacacttgagtgtgtgacgcctattacaacat

SEQ ID NO: 50653 - DNA, 50 bp, synthetic construct
  source 1..50: mol_type = other DNA
gatgctaacagcaggaatgtgaatttttttacatcaaatcgccttaaaag

SEQ ID NO: 50654 - DNA, 50 bp, synthetic construct
  source 1..50: mol_type = other DNA
taagcataacacatttgtatgattatcatgatttggatttgtttttgtat

SEQ ID NO: 50655 - DNA, 50 bp, synthetic construct
  source 1..50: mol_type = other DNA
tcgattagtaaacaaccttctgtgatcacataaggtttgttataactgtt

SEQ ID NO: 50656 - DNA, 50 bp, synthetic construct
  source 1..50: mol_type = other DNA
agataaattcgataagttcttccgtactatagaatacatattctttatcg

SEQ ID NO: 50657 - DNA, 50 bp, synthetic construct
  source 1..50: mol_type = other DNA
tttggtatgtagtttttccgatagtactatcggatcaaggtgtctcagcc

SEQ ID NO: 50658 - DNA, 50 bp, synthetic construct
  source 1..50: mol_type = other DNA
ctgataagccgggatgccaatcgcgccgctgttgaatcaggggttattga

SEQ ID NO: 50659 - DNA, 50 bp, synthetic construct
  source 1..50: mol_type = other DNA
tttagtctctcgatttctctcgctggacggagacgaatcgagaaactaaa

SEQ ID NO: 50660 - DNA, 50 bp, synthetic construct
  source 1..50: mol_type = other DNA
tagttttgcgctttataattaacattatcggttggtgatgcggttttcta

SEQ ID NO: 50661 - DNA, 50 bp, synthetic construct
  source 1..50: mol_type = other DNA
ttgaggaactcattatgtccgataaatttgtaccgtcataatcaactaag

SEQ ID NO: 50662 - DNA, 50 bp, synthetic construct
  source 1..50: mol_type = other DNA
tgctgttcgacgaaccaaccgcggcgccgacgatatcccgaatgccagca

SEQ ID NO: 50663 - DNA, 50 bp, synthetic construct
  source 1..50: mol_type = other DNA
atatcaacgttccacacgtgtaagcactctgtatcttcctactataataa

SEQ ID NO: 50664 - DNA, 50 bp, synthetic construct
  source 1..50: mol_type = other DNA
gttagggggttgacctcatttgggttccctattattatacacccatcgaa

SEQ ID NO: 50665 - DNA, 50 bp, synthetic construct
  source 1..50: mol_type = other DNA
gccgggttatggtgttggggtctaattggaccccataacactatgcacca

SEQ ID NO: 50666 - DNA, 50 bp, synthetic construct
  source 1..50: mol_type = other DNA
tactctctcgtgttgatgggtgtatgtcaaccccttactataaaattttt

SEQ ID NO: 50667 - DNA, 50 bp, synthetic construct
  source 1..50: mol_type = other DNA
tactttacccaattaaatcaccttcaacggtgtaagtcttttgtaaaagg

SEQ ID NO: 50668 - DNA, 50 bp, synthetic construct
  source 1..50: mol_type = other DNA
atttttgaagaattttcttgagatgcagctacccggagcttttcaaaagg

SEQ ID NO: 50669 - DNA, 50 bp, synthetic construct
  source 1..50: mol_type = other DNA
ttcctccaataatcacattatccataaatattttattatatttgagccaa

SEQ ID NO: 50670 - DNA, 50 bp, synthetic construct
  source 1..50: mol_type = other DNA
taccatatttacatctttttgtggatcttataaaaacaattaatatttct

SEQ ID NO: 50671 - DNA, 50 bp, synthetic construct
  source 1..50: mol_type = other DNA
atacttcttctatcaatacctaaatacttaatttaatgggtattaaatat

SEQ ID NO: 50672 - DNA, 50 bp, synthetic construct
  source 1..50: mol_type = other DNA
taaatctaataacttatatgataaattttccatatgtgcctttatttttt

SEQ ID NO: 50673 - DNA, 50 bp, synthetic construct
  source 1..50: mol_type = other DNA
acttctgttacttctttatcgcacatgtgtcataaagtagcatataaaaa

SEQ ID NO: 50674 - DNA, 50 bp, synthetic construct
  source 1..50: mol_type = other DNA
aaaaatttagttattgggggtttacatgtacccacaataacacgaggggg

SEQ ID NO: 50675 - DNA, 50 bp, synthetic construct
  source 1..50: mol_type = other DNA
ataacaggtctcttagataaccgaattcggcattgtagcattagccataa

SEQ ID NO: 50676 - DNA, 50 bp, synthetic construct
  source 1..50: mol_type = other DNA
aaaccatactctcgtaaggttttcttcaaaaccttatctatcaagctttt

SEQ ID NO: 50677 - DNA, 50 bp, synthetic construct
  source 1..50: mol_type = other DNA
cgtatcgtcgcgcagacgcgcccacttgccggcgtttgcgaaggtgttga

SEQ ID NO: 50678 - DNA, 50 bp, synthetic construct
  source 1..50: mol_type = other DNA
tttactacaacaggagtgtgttcttgtctactgatattagtagtatttgt

SEQ ID NO: 50679 - DNA, 50 bp, synthetic construct
  source 1..50: mol_type = other DNA
gactagactgaatgctgtagtagagggcaccattagtctcaaatccgaac

SEQ ID NO: 50680 - DNA, 50 bp, synthetic construct
  source 1..50: mol_type = other DNA
ggtatgcaatttatatatggtatctcgaacccgtggtcaacttgaatacc

SEQ ID NO: 50681 - DNA, 50 bp, synthetic construct
  source 1..50: mol_type = other DNA
tatgaggggttgacacacttggggttccctaatactctatacccgtcaac

SEQ ID NO: 50682 - DNA, 50 bp, synthetic construct
  source 1..50: mol_type = other DNA
agagatttttgtaggaatgaacccaacaatgaatacctaaaaaaatgtgt

SEQ ID NO: 50683 - DNA, 50 bp, synthetic construct
  source 1..50: mol_type = other DNA
ttttgctgaggtggatgcggtctcaaagcacagcaatggaaacaacaaaa

SEQ ID NO: 50684 - DNA, 50 bp, synthetic construct
  source 1..50: mol_type = other DNA
aaaattcaacaatcaatttttctaatgagaaggattgatttcaatttttt

SEQ ID NO: 50685 - DNA, 50 bp, synthetic construct
  source 1..50: mol_type = other DNA
ggcatattaatcctcctctcatcaagggataagagagtgagtaaaattat

SEQ ID NO: 50686 - DNA, 50 bp, synthetic construct
  source 1..50: mol_type = other DNA
ccagcgaaatggcaaggccaaggccggcccaccgcaacgacatccgcgcc

SEQ ID NO: 50687 - DNA, 50 bp, synthetic construct
  source 1..50: mol_type = other DNA
tatgagcctgatgaggccgccgaccctacggccaggctatcagcagatgc

SEQ ID NO: 50688 - DNA, 50 bp, synthetic construct
  source 1..50: mol_type = other DNA
ccctaatcaacctcatagtgtatttaaatacactacctaaagcgatacaa

SEQ ID NO: 50689 - DNA, 50 bp, synthetic construct
  source 1..50: mol_type = other DNA
agagtttacttgactagtgaactgcgcaaacgatttatccagcaaatgaa

SEQ ID NO: 50690 - DNA, 50 bp, synthetic construct
  source 1..50: mol_type = other DNA
taattttttcaaaattagttgcactactatgaatagaagtggaaaaaaat

SEQ ID NO: 50691 - DNA, 50 bp, synthetic construct
  source 1..50: mol_type = other DNA
tattctggcgtttcatactccttatatcgcggagtggagcagttggtagc

SEQ ID NO: 50692 - DNA, 50 bp, synthetic construct
  source 1..50: mol_type = other DNA
atctgagctacggcccctgaaaattaaaccgcagaggcggcccctctgga

SEQ ID NO: 50693 - DNA, 50 bp, synthetic construct
  source 1..50: mol_type = other DNA
aggagccgagcgatcctggctctacggactgcgagcttacaagggcgctc

SEQ ID NO: 50694 - DNA, 50 bp, synthetic construct
  source 1..50: mol_type = other DNA
gatgccacaagaacttttcatcacactaaaaagcctgtattttatacata

SEQ ID NO: 50695 - DNA, 50 bp, synthetic construct
  source 1..50: mol_type = other DNA
agtttaaagcaacaaatcaaaattataaaatgacgttgtttaactattaa

SEQ ID NO: 50696 - DNA, 50 bp, synthetic construct
  source 1..50: mol_type = other DNA
ggcggggcgccggccgcaagataggacaatcacgcggatgggtcgtcggt

SEQ ID NO: 50697 - DNA, 50 bp, synthetic construct
  source 1..50: mol_type = other DNA
ctatccgacacaatgcgcaagtgccggatcctggctggcaaactgggaaa

SEQ ID NO: 50698 - DNA, 50 bp, synthetic construct
  source 1..50: mol_type = other DNA
aatgggaagatcatcgggaattttggtggcaaagaccgatttttccagct

SEQ ID NO: 50699 - DNA, 50 bp, synthetic construct
  source 1..50: mol_type = other DNA
ttctattatcttttctaaataaaactttttattcattaaatattgtaaag

SEQ ID NO: 50700 - DNA, 50 bp, synthetic construct
  source 1..50: mol_type = other DNA
ctgtaagatccgatcttacaggtattaacctgtgattttttgggtgtcgt

SEQ ID NO: 50701 - DNA, 50 bp, synthetic construct
  source 1..50: mol_type = other DNA
aacatctgctcatggtttccacgcagccgtgttcgccgtggcgatagctg

SEQ ID NO: 50702 - DNA, 50 bp, synthetic construct
  source 1..50: mol_type = other DNA
ttttgcttcatatatacattaagtatactatacacctcatcgtagcaaat

SEQ ID NO: 50703 - DNA, 50 bp, synthetic construct
  source 1..50: mol_type = other DNA
tgagtaccgaagtgcagaccattcatgatccgaacatacattcttaaaag

SEQ ID NO: 50704 - DNA, 50 bp, synthetic construct
  source 1..50: mol_type = other DNA
tctcggtcatgtcgagaaggtcggttgcgtcgatcccggcatgctcgaaa

SEQ ID NO: 50705 - DNA, 50 bp, synthetic construct
  source 1..50: mol_type = other DNA
tcgaagcagtctttgttgccgccgacaagcggaacaggaattcacttcac

SEQ ID NO: 50706 - DNA, 50 bp, synthetic construct
  source 1..50: mol_type = other DNA
aaaccgcatcacttatgatatgcttctgcgtatcggttaatgatgcggtt

SEQ ID NO: 50707 - DNA, 50 bp, synthetic construct
  source 1..50: mol_type = other DNA
ttgtttatgggccccgcgggcaacaaattgctaattttcgacatattttt

SEQ ID NO: 50708 - DNA, 50 bp, synthetic construct
  source 1..50: mol_type = other DNA
gagtcgcacggtcactgcgatacccgcatttcccagtggcttgaggccgc

SEQ ID NO: 50709 - DNA, 50 bp, synthetic construct
  source 1..50: mol_type = other DNA
gcggtggcgcgttgatgatgaacgccggtgggcttaaccagtgaggggag

SEQ ID NO: 50710 - DNA, 50 bp, synthetic construct
  source 1..50: mol_type = other DNA
acatatgtccgcatatgtcgcgggatcaggcgtttagagcgtgtatagac

SEQ ID NO: 50711 - DNA, 50 bp, synthetic construct
  source 1..50: mol_type = other DNA
gagcaccagactcgaaccgacaccgctgcagtggctcgagtggcaggctc

SEQ ID NO: 50712 - DNA, 50 bp, synthetic construct
  source 1..50: mol_type = other DNA
gcaaactaatcggtaacgaactgcatagacacaagcaccaatcagtttag

SEQ ID NO: 50713 - DNA, 50 bp, synthetic construct
  source 1..50: mol_type = other DNA
gaatacaaaaacctaacccaaccagctggaaggagaataacagtggctac

SEQ ID NO: 50714 - DNA, 50 bp, synthetic construct
  source 1..50: mol_type = other DNA
gtggtcaggactccggcgggcacgtacgtccgatggggtgttggcgtgca

SEQ ID NO: 50715 - DNA, 50 bp, synthetic construct
  source 1..50: mol_type = other DNA
gaacttttgttgaacagctaaacagatgtgggactgaacgtcagattttc

SEQ ID NO: 50716 - DNA, 50 bp, synthetic construct
  source 1..50: mol_type = other DNA
atgttttttataccttctaatcatatgtgtttagggagtataaaaaaggc

SEQ ID NO: 50717 - DNA, 50 bp, synthetic construct
  source 1..50: mol_type = other DNA
cggccctcgcatacatggcgttgccgccgacggtcgccatgcgcgagcgg

SEQ ID NO: 50718 - DNA, 50 bp, synthetic construct
  source 1..50: mol_type = other DNA
atgccgctggcggggacgggatgcgctcagccgtcgccccccgatgtgat

SEQ ID NO: 50719 - DNA, 50 bp, synthetic construct
  source 1..50: mol_type = other DNA
gctctcctgcgtagcctgcaacccgctgagtagagcagcgcgaagagaag

SEQ ID NO: 50720 - DNA, 50 bp, synthetic construct
  source 1..50: mol_type = other DNA
gatgccgtggacataaggcacgtcgcgacgacgatggtggtcccggaacc

SEQ ID NO: 50721 - DNA, 50 bp, synthetic construct
  source 1..50: mol_type = other DNA
ggatacgactcgatgatggcggctaccgccgccatgatgctgcgcgcatg

SEQ ID NO: 50722 - DNA, 50 bp, synthetic construct
  source 1..50: mol_type = other DNA
ttctgttgttaggtaacttaagcttgtcctactgctacttaacaacagat

SEQ ID NO: 50723 - DNA, 50 bp, synthetic construct
  source 1..50: mol_type = other DNA
atgatgatgaagctcaggtgctacggactgtttagtcgatttatcaccat

SEQ ID NO: 50724 - DNA, 50 bp, synthetic construct
  source 1..50: mol_type = other DNA
gagaatacgccaaactttatagtgcaaactataaagtttggtcacttatc

SEQ ID NO: 50725 - DNA, 50 bp, synthetic construct
  source 1..50: mol_type = other DNA
cgagaaaaggcgcatggaaatgagcgctcatttccatgcgcgttgacgcg

SEQ ID NO: 50726 - DNA, 50 bp, synthetic construct
  source 1..50: mol_type = other DNA
catgggcagaatgaacgggggatgggcgggcctgagtcattacgcactcc

SEQ ID NO: 50727 - DNA, 50 bp, synthetic construct
  source 1..50: mol_type = other DNA
ccagaattaatgtagcataatttgctgacgttatgctacattaatttgcg

SEQ ID NO: 50728 - DNA, 50 bp, synthetic construct
  source 1..50: mol_type = other DNA
atataaaaaagaatatgatgccttaataagcagtttattctttgaaatag

SEQ ID NO: 50729 - DNA, 50 bp, synthetic construct
  source 1..50: mol_type = other DNA
ttataatatgcttacagataaatagtgagaaatgggaatacaatgctaga

SEQ ID NO: 50730 - DNA, 50 bp, synthetic construct
  source 1..50: mol_type = other DNA
cctttttgtgttcctatcatagtgttatgtatgacaagtactcaaattaa

SEQ ID NO: 50731 - DNA, 50 bp, synthetic construct
  source 1..50: mol_type = other DNA
taatttagacggaactgtttccgaatgctatatattaaatatactaatta

SEQ ID NO: 50732 - DNA, 50 bp, synthetic construct
  source 1..50: mol_type = other DNA
caccatagttattttaacttctttagaaagaaggaatatttgctatggca

SEQ ID NO: 50733 - DNA, 50 bp, synthetic construct
  source 1..50: mol_type = other DNA
tatatattttgccatcaggcagattcatccccatgagagacaaacacata

SEQ ID NO: 50734 - DNA, 50 bp, synthetic construct
  source 1..50: mol_type = other DNA
tccaacttagttttcagttcatcaaatatcttgctaaaaagaaagatata

SEQ ID NO: 50735 - DNA, 50 bp, synthetic construct
  source 1..50: mol_type = other DNA
caagatcatggtgtggctccttttactgaaagaaaaactttttgatcttg

SEQ ID NO: 50736 - DNA, 50 bp, synthetic construct
  source 1..50: mol_type = other DNA
ttgaatgtcgccaaaaaattgccgataggcaatttgcaggggaacaaaaa

SEQ ID NO: 50737 - DNA, 50 bp, synthetic construct
  source 1..50: mol_type = other DNA
ctttcaattatcgttgaaaaatgataaaatatctattttcgattgtaaag

SEQ ID NO: 50738 - DNA, 50 bp, synthetic construct
  source 1..50: mol_type = other DNA
ccatctctccatgtggttcttataatggtgtcgcagactttaggagaaag

SEQ ID NO: 50739 - DNA, 50 bp, synthetic construct
  source 1..50: mol_type = other DNA
ataaaaggtaaatgactatcttttgatattgataaaattatagaatatat

SEQ ID NO: 50740 - DNA, 50 bp, synthetic construct
  source 1..50: mol_type = other DNA
aggtgaacatcttaagaaaaccgaattcggcattgtagcattagccataa

SEQ ID NO: 50741 - DNA, 50 bp, synthetic construct
  source 1..50: mol_type = other DNA
tatggctaatgctacaatgccgaatattcggttttctaagagacctgtta

SEQ ID NO: 50742 - DNA, 50 bp, synthetic construct
  source 1..50: mol_type = other DNA
gccccttggctttttcatggtgagggaagttctgctattggctaaggtca

SEQ ID NO: 50743 - DNA, 50 bp, synthetic construct
  source 1..50: mol_type = other DNA
tgccttgccctcgccggggtgcagattctcaagcgctcgccaagaagggg

SEQ ID NO: 50744 - DNA, 50 bp, synthetic construct
  source 1..50: mol_type = other DNA
tttcaaaccacattaaacttttaacgttcgcaattgaaaggagttagaaa

SEQ ID NO: 50745 - DNA, 50 bp, synthetic construct
  source 1..50: mol_type = other DNA
agattaatttcagccagttcttctagaggagaactggctgcggcggcttc

SEQ ID NO: 50746 - DNA, 50 bp, synthetic construct
  source 1..50: mol_type = other DNA
atgctggttctgatatttattccaccgattggaagcgacaaggagggcaa

SEQ ID NO: 50747 - DNA, 50 bp, synthetic construct
  source 1..50: mol_type = other DNA
atttttgatctgtcttttgttccaattctatgaaaatgaaggtcaaagag

SEQ ID NO: 50748 - DNA, 50 bp, synthetic construct
  source 1..50: mol_type = other DNA
ttgcgccggggccgcgtcctcgttcgcaggcgggaaaggcaccgtcgccg

SEQ ID NO: 50749 - DNA, 50 bp, synthetic construct
  source 1..50: mol_type = other DNA
gtggtcgcggacgtattcgatcatttatacaaaaatacgcgcgtcaccaa

SEQ ID NO: 50750 - DNA, 50 bp, synthetic construct
  source 1..50: mol_type = other DNA
tttttatttataattttagtttctcgaggtactaaacaacgtaaaaaaac

SEQ ID NO: 50751 - DNA, 50 bp, synthetic construct
  source 1..50: mol_type = other DNA
agggcagtatagccacggagggaggcctacgctggttcgaatccagcccc

SEQ ID NO: 50752 - DNA, 50 bp, synthetic construct
  source 1..50: mol_type = other DNA
cattaattgccatctctattctttattaaaccatatgatgatgatcactc

SEQ ID NO: 50753 - DNA, 50 bp, synthetic construct
  source 1..50: mol_type = other DNA
tatagggaaatggtacatagaacgctgctactttgcaatatttacctgta

SEQ ID NO: 50754 - DNA, 50 bp, synthetic construct
  source 1..50: mol_type = other DNA
cgcaagttacattataaattatcgctgtgtagcgtcaaaagtaactttca

SEQ ID NO: 50755 - DNA, 50 bp, synthetic construct
  source 1..50: mol_type = other DNA
ttatcaaaacttagtagaataggtataccgaatctaataagttttatctt

SEQ ID NO: 50756 - DNA, 50 bp, synthetic construct
  source 1..50: mol_type = other DNA
ctctcttttttaaagctagaaataatgatgagtcggctaaaaagtcagaa

SEQ ID NO: 50757 - DNA, 50 bp, synthetic construct
  source 1..50: mol_type = other DNA
ttagtttggacatattttcacgttataactaagttatatttgatgcaaaa

SEQ ID NO: 50758 - DNA, 50 bp, synthetic construct
  source 1..50: mol_type = other DNA
gtcgataactatattttcgtgcaaatttgaaagtcaaaatatttatacac

SEQ ID NO: 50759 - DNA, 50 bp, synthetic construct
  source 1..50: mol_type = other DNA
cgtacaaatgagtatatatcaagtcttatttagaaaatctacggtgtatg

SEQ ID NO: 50760 - DNA, 50 bp, synthetic construct
  source 1..50: mol_type = other DNA
gtgtaggacaggccttgattggtggcgtaaattcaaggatttctacatat

SEQ ID NO: 50761 - DNA, 50 bp, synthetic construct
  source 1..50: mol_type = other DNA
cattaattacaaaaccaaccaaaaccagaccgttgcttttgtcatggatt

SEQ ID NO: 50762 - DNA, 50 bp, synthetic construct
  source 1..50: mol_type = other DNA
gccttgaggcacagaaagaccggctggacggtctttgtttgcgagatatt

SEQ ID NO: 50763 - DNA, 50 bp, synthetic construct
  source 1..50: mol_type = other DNA
atcgaggaagcgggataaatatcagaagatatttcttttctttaaataaa

SEQ ID NO: 50764 - DNA, 50 bp, synthetic construct
  source 1..50: mol_type = other DNA
gatcgacttccgcaacaagctgattgatcgagcagttgcagaaaccgaca

SEQ ID NO: 50765 - DNA, 50 bp, synthetic construct
  source 1..50: mol_type = other DNA
cgttcgtggagcaagaagaagaaaaatgcgcctatctgactcgcgatacc

SEQ ID NO: 50766 - DNA, 50 bp, synthetic construct
  source 1..50: mol_type = other DNA
aaaagaaggacaccactgcatgagtagaagtggcaccttgtcctggtttt

SEQ ID NO: 50767 - DNA, 50 bp, synthetic construct
  source 1..50: mol_type = other DNA
tcattgaaaggcagatgaaaagcggcatgtatggatacaacgcgaaacag

SEQ ID NO: 50768 - DNA, 50 bp, synthetic construct
  source 1..50: mol_type = other DNA
ctagttactaagagatcactccgctgggtcgccctagctttatctactta

SEQ ID NO: 50769 - DNA, 50 bp, synthetic construct
  source 1..50: mol_type = other DNA
ttccatctgcgaggtggaaggtgagcgcagctcccagctccaccaaagcc

SEQ ID NO: 50770 - DNA, 50 bp, synthetic construct
  source 1..50: mol_type = other DNA
tgaaagaagcacaagctcacctcggttgtgacattcccaagtttctttgt

SEQ ID NO: 50771 - DNA, 50 bp, synthetic construct
  source 1..50: mol_type = other DNA
cttgctgtaatgcccctgtgggctccccttcactttggctgtacatcaaa

SEQ ID NO: 50772 - DNA, 50 bp, synthetic construct
  source 1..50: mol_type = other DNA
agttgtctattttaagaagtttatcagttaacttcttaaagtagataatt

SEQ ID NO: 50773 - DNA, 50 bp, synthetic construct
  source 1..50: mol_type = other DNA
ttcgattaccatcagtccaatggatgaacactgatactttttaaaaaagt

SEQ ID NO: 50774 - DNA, 50 bp, synthetic construct
  source 1..50: mol_type = other DNA
aaaaatgtctaagattggatttatatcaagaaataaagccagctcgttaa

SEQ ID NO: 50775 - DNA, 50 bp, synthetic construct
  source 1..50: mol_type = other DNA
tctttggctggttctttaggcggtattgtgattacgttctttgccacttt

SEQ ID NO: 50776 - DNA, 50 bp, synthetic construct
  source 1..50: mol_type = other DNA
gtactacgcaacctattttttagtttgctaaaaattaaaaagccgatcta

SEQ ID NO: 50777 - DNA, 50 bp, synthetic construct
  source 1..50: mol_type = other DNA
cccctattttgctttaggatgaactataacataacaaagtaatttaatat

SEQ ID NO: 50778 - DNA, 50 bp, synthetic construct
  source 1..50: mol_type = other DNA
gagaaaattttagacttcaatatttaaagattctagttctaagttttcag

SEQ ID NO: 50779 - DNA, 50 bp, synthetic construct
  source 1..50: mol_type = other DNA
tctaattcattttgattttcaagaatttatgaaagctgcaatttattctc

SEQ ID NO: 50780 - DNA, 50 bp, synthetic construct
  source 1..50: mol_type = other DNA
tatgttatgccacaacaaagaaaaatttttctcctttaaataatatttca

SEQ ID NO: 50781 - DNA, 50 bp, synthetic construct
  source 1..50: mol_type = other DNA
taaaattattattttatcaaaacgcctatttttttaaaaatttattttta

SEQ ID NO: 50782 - DNA, 50 bp, synthetic construct
  source 1..50: mol_type = other DNA
ggttgataaagaagaggctgaaaatatttgtttttcgttcattagacacc

SEQ ID NO: 50783 - DNA, 50 bp, synthetic construct
  source 1..50: mol_type = other DNA
ggtaaaaatagaaggattgtgtttaggaacaataaaatgaccagcttgcc

SEQ ID NO: 50784 - DNA, 50 bp, synthetic construct
  source 1..50: mol_type = other DNA
tatatatgctataatttaaatacaagggaatttatgatagctgcaatata

SEQ ID NO: 50785 - DNA, 50 bp, synthetic construct
  source 1..50: mol_type = other DNA
aactcctcctctagatttattttgagtgggataatttagaaggagcagtc

SEQ ID NO: 50786 - DNA, 50 bp, synthetic construct
  source 1..50: mol_type = other DNA
acatactccgcttgtgtaaaaggattgtttttttgttagattatgtttca

SEQ ID NO: 50787 - DNA, 50 bp, synthetic construct
  source 1..50: mol_type = other DNA
tgtttccggtggtggtaaagagcctttcagctttttcttcatcgataact

SEQ ID NO: 50788 - DNA, 50 bp, synthetic construct
  source 1..50: mol_type = other DNA
cccggacagccgttgcctggtgccgcggaatcataatccgcgtgtcgggg

SEQ ID NO: 50789 - DNA, 50 bp, synthetic construct
  source 1..50: mol_type = other DNA
gtgaaggatgttcacagtggccttgacagttgtcactacgaacagcccaa

SEQ ID NO: 50790 - DNA, 50 bp, synthetic construct
  source 1..50: mol_type = other DNA
atgcgggggcctcctcagtcggggagccccggctgcggaggtttttgcat

SEQ ID NO: 50791 - DNA, 50 bp, synthetic construct
  source 1..50: mol_type = other DNA
tttatagactgtttagccttgattttatccatgggtaaacagtctataaa

SEQ ID NO: 50792 - DNA, 50 bp, synthetic construct
  source 1..50: mol_type = other DNA
ttagtaacttattaacattatggcttaaaataatgttacgtttatacttt

SEQ ID NO: 50793 - DNA, 50 bp, synthetic construct
  source 1..50: mol_type = other DNA
gcggttattgtttgctgttaacgcttatgttaacagcaaccatatataaa

SEQ ID NO: 50794 - DNA, 50 bp, synthetic construct
  source 1..50: mol_type = other DNA
ttataattatatttatcactcaaaaagtttaaatatggattaaattaatg

SEQ ID NO: 50795 - DNA, 50 bp, synthetic construct
  source 1..50: mol_type = other DNA
attacctgagtttgcttcaaactctagagtctgaagacagctaatcaaat

SEQ ID NO: 50796 - DNA, 50 bp, synthetic construct
  source 1..50: mol_type = other DNA
caggctataaaagtgttgaaatcaattgatttaggaaatttaattacctt

SEQ ID NO: 50797 - DNA, 50 bp, synthetic construct
  source 1..50: mol_type = other DNA
aggtatcaatcgctttcttaaagtgaagggcaaggcggcgatggaaacca

SEQ ID NO: 50798 - DNA, 50 bp, synthetic construct
  source 1..50: mol_type = other DNA
tggtttaattcaattacatacaacatgttgtatgtattttaatttagttc

SEQ ID NO: 50799 - DNA, 50 bp, synthetic construct
  source 1..50: mol_type = other DNA
agttgtctttttattcacacagcatgtccagtatgaataaaaaaacaaca

SEQ ID NO: 50800 - DNA, 50 bp, synthetic construct
  source 1..50: mol_type = other DNA
aaattattagattttacaactatttaaatagttatgaaattattatattt

SEQ ID NO: 50801 - DNA, 50 bp, synthetic construct
  source 1..50: mol_type = other DNA
attatcagatttgtaaagttagcatctccgctcgttccaaaactgatata

SEQ ID NO: 50802 - DNA, 50 bp, synthetic construct
  source 1..50: mol_type = other DNA
acgttatggctaatgctacaatgccggttttctaagagacctgttaatta

SEQ ID NO: 50803 - DNA, 50 bp, synthetic construct
  source 1..50: mol_type = other DNA
tcatattttctttcacatccttttttaaacgtccaactaaacaagcacga

SEQ ID NO: 50804 - DNA, 50 bp, synthetic construct
  source 1..50: mol_type = other DNA
ttcttagaaaaccgaatagacttcattgtagctattcggcattgtagcat

SEQ ID NO: 50805 - DNA, 50 bp, synthetic construct
  source 1..50: mol_type = other DNA
ttgtatcgctttaggtggtgtatttaaatacacctccagtttcagatggt

SEQ ID NO: 50806 - DNA, 50 bp, synthetic construct
  source 1..50: mol_type = other DNA
gtttaggtgcccatgtagtgcatttaaatacaccatctaaagcgatacaa

SEQ ID NO: 50807 - DNA, 50 bp, synthetic construct
  source 1..50: mol_type = other DNA
gtatttattaaaaaggttaatattgcatcattccccttaaaacgtaatat

SEQ ID NO: 50808 - DNA, 50 bp, synthetic construct
  source 1..50: mol_type = other DNA
aggccgcgccgacgatttctcgcggaccgtggtggccgtgcccgtggtcg

SEQ ID NO: 50809 - DNA, 50 bp, synthetic construct
  source 1..50: mol_type = other DNA
gggacagggccgcggccgcggccgggacaacccgctggcgctattgatag

SEQ ID NO: 50810 - DNA, 50 bp, synthetic construct
  source 1..50: mol_type = other DNA
tacatatcagctcccagttcccataaacgggaaccgagaaatcggttccc

SEQ ID NO: 50811 - DNA, 50 bp, synthetic construct
  source 1..50: mol_type = other DNA
gtcgctgcggtggccggcggcggggcctgataaaaagtcagcttcaggac

SEQ ID NO: 50812 - DNA, 50 bp, synthetic construct
  source 1..50: mol_type = other DNA
atggttgtaaacgatactcgtggaattccattaccaacttttacagccct

SEQ ID NO: 50813 - DNA, 50 bp, synthetic construct
  source 1..50: mol_type = other DNA
agatggccgagcaatgggaatgaccgggcctgcccggtgctggtgcagtg

SEQ ID NO: 50814 - DNA, 50 bp, synthetic construct
  source 1..50: mol_type = other DNA
cttttccctttaatactaaagttaataaacttgagctttaacaggaaaaa

SEQ ID NO: 50815 - DNA, 50 bp, synthetic construct
  source 1..50: mol_type = other DNA
ctcgtgttattgtgggtacataatatgtagtcaacccaaaataactaaaa

SEQ ID NO: 50816 - DNA, 50 bp, synthetic construct
  source 1..50: mol_type = other DNA
tggttgtaaatatagcttgtgggctattcgactgtctagttttactacca

SEQ ID NO: 50817 - DNA, 50 bp, synthetic construct
  source 1..50: mol_type = other DNA
aggaaatcctgtcttttcaatgagatcgtagaggcccgacaggtcattca

SEQ ID NO: 50818 - DNA, 50 bp, synthetic construct
  source 1..50: mol_type = other DNA
ctcactcatatttccattcgtataagctgagcaattactataatgaggag

SEQ ID NO: 50819 - DNA, 50 bp, synthetic construct
  source 1..50: mol_type = other DNA
tgtttcaccctctaaaatttaatattgattaaattttcgacaaacatata

SEQ ID NO: 50820 - DNA, 50 bp, synthetic construct
  source 1..50: mol_type = other DNA
ttgtgtgcttcaaattatattacattcgtgatacattttcaagcacgcaa

SEQ ID NO: 50821 - DNA, 50 bp, synthetic construct
  source 1..50: mol_type = other DNA
tggaaacaaatactataaagatgtttacatccaataaaatttagtcacct

SEQ ID NO: 50822 - DNA, 50 bp, synthetic construct
  source 1..50: mol_type = other DNA
gagcgaagattaatcagccggattttcttcgggcaccctaatgatataaa

SEQ ID NO: 50823 - DNA, 50 bp, synthetic construct
  source 1..50: mol_type = other DNA
tgtttaccctacataaactttgcacaggcaaagtttatgtagagtaaata

SEQ ID NO: 50824 - DNA, 50 bp, synthetic construct
  source 1..50: mol_type = other DNA
agtgtttcaggcttgcatacttattgattagtatgcaaatcaagatggag

SEQ ID NO: 50825 - DNA, 50 bp, synthetic construct
  source 1..50: mol_type = other DNA
aaaaatatttctcaagctgctaaaaagcgtaaccagcacatgattttttc

SEQ ID NO: 50826 - DNA, 50 bp, synthetic construct
  source 1..50: mol_type = other DNA
atctgattctaatcaagtgctcatcaagcagcatacgcttacagtcaaat

SEQ ID NO: 50827 - DNA, 50 bp, synthetic construct
  source 1..50: mol_type = other DNA
agttacagtttaaaaccaccacgagttcggggtggacttaaacagttatg

SEQ ID NO: 50828 - DNA, 50 bp, synthetic construct
  source 1..50: mol_type = other DNA
tacttcttgctaataaactctttgtaacgcaattaaattaaaaaggggta

SEQ ID NO: 50829 - DNA, 50 bp, synthetic construct
  source 1..50: mol_type = other DNA
gaaagtcactttgttcgccagaccgagcaacggcgaacaaagtcacctac

SEQ ID NO: 50830 - DNA, 50 bp, synthetic construct
  source 1..50: mol_type = other DNA
ctacattttacactggaccgatggatccattggaccgagcaacggcgaac

SEQ ID NO: 50831 - DNA, 50 bp, synthetic construct
  source 1..50: mol_type = other DNA
agtgagcagagctacactctccacgttgaaagtacactctgtatcttact

SEQ ID NO: 50832 - DNA, 50 bp, synthetic construct
  source 1..50: mol_type = other DNA
ctgtatactaaaataactaacatcgtgatgctagttctttttcctacaac

SEQ ID NO: 50833 - DNA, 50 bp, synthetic construct
  source 1..50: mol_type = other DNA
tatggcttttccactaaaaatagctcgcagtttttaggggaaatgccgta

SEQ ID NO: 50834 - DNA, 50 bp, synthetic construct
  source 1..50: mol_type = other DNA
gctggatcgtctgggagaccatgccggcatggtctcccagacgatccagc

SEQ ID NO: 50835 - DNA, 50 bp, synthetic construct
  source 1..50: mol_type = other DNA
aggtgcatttagaccttgctaatcttcatcagacacgtttaaatacacca

SEQ ID NO: 50836 - DNA, 50 bp, synthetic construct
  source 1..50: mol_type = other DNA
gtgtatcaatagaaaggtctcttcaggattacacatttcttatgatacac

SEQ ID NO: 50837 - DNA, 50 bp, synthetic construct
  source 1..50: mol_type = other DNA
ttttttccactcctattcatagtcatgaatttgaagcagatggaaaactt

SEQ ID NO: 50838 - DNA, 50 bp, synthetic construct
  source 1..50: mol_type = other DNA
tgcgatactattacaaactcttcgttggttgggtttatattagtattgca

SEQ ID NO: 50839 - DNA, 50 bp, synthetic construct
  source 1..50: mol_type = other DNA
caaactgttatagtgttggtattgagtattaccaacactattacaagttg

SEQ ID NO: 50840 - DNA, 50 bp, synthetic construct
  source 1..50: mol_type = other DNA
ttcaagtcggggttaattcagacatgtagctggaatcaccccaagcgtgt

SEQ ID NO: 50841 - DNA, 50 bp, synthetic construct
  source 1..50: mol_type = other DNA
gcaaactttaaaaaggttgtgtattattacacaaccattataaaaacgca

SEQ ID NO: 50842 - DNA, 50 bp, synthetic construct
  source 1..50: mol_type = other DNA
aagatttactttttaagggttaatattattccccttaaaacgtaatatca

SEQ ID NO: 50843 - DNA, 50 bp, synthetic construct
  source 1..50: mol_type = other DNA
aatatgcacaccttagcttactgcgagcagttggcacaggtgtgcacatt

SEQ ID NO: 50844 - DNA, 50 bp, synthetic construct
  source 1..50: mol_type = other DNA
agcccttgaaaatcaagggcttaatgtggcggagagagtgggacgaatat

SEQ ID NO: 50845 - DNA, 50 bp, synthetic construct
  source 1..50: mol_type = other DNA
ctaaaatcaagtatcagcgttcgccagcgatcgcacatcacttccactaa

SEQ ID NO: 50846 - DNA, 50 bp, synthetic construct
  source 1..50: mol_type = other DNA
ctacctttaaaaggtaaatattacatgcaatattaccccttctaataaga

SEQ ID NO: 50847 - DNA, 50 bp, synthetic construct
  source 1..50: mol_type = other DNA
caagttaccactatacattagacagaaagcaaatgtacagtgcataacta

SEQ ID NO: 50848 - DNA, 50 bp, synthetic construct
  source 1..50: mol_type = other DNA
ccgtaataaagtgcattgaaatgaacagattatgatgcacttcataattt

SEQ ID NO: 50849 - DNA, 50 bp, synthetic construct
  source 1..50: mol_type = other DNA
acattttttaaaaaggttaatattgcattattaaccttaaaacgtaatat

SEQ ID NO: 50850 - DNA, 50 bp, synthetic construct
  source 1..50: mol_type = other DNA
ttatgtcataaccgatacaataccttagttaggttttcttaaagacaaaa

SEQ ID NO: 50851 - DNA, 50 bp, synthetic construct
  source 1..50: mol_type = other DNA
taagagttatcttcttttgtcgttatcaatgaaaatgaagaaatatcgaa

SEQ ID NO: 50852 - DNA, 50 bp, synthetic construct
  source 1..50: mol_type = other DNA
gatttattcaagggatatgtgtggaatgtgcgataaaccttgatataaca

SEQ ID NO: 50853 - DNA, 50 bp, synthetic construct
  source 1..50: mol_type = other DNA
ggcttttcttatttacggattgactttataaaccaacaatctttaaagct

SEQ ID NO: 50854 - DNA, 50 bp, synthetic construct
  source 1..50: mol_type = other DNA
ggaggttctaacatgacacttttggtggccctggctcaatacacccacaa

SEQ ID NO: 50855 - DNA, 50 bp, synthetic construct
  source 1..50: mol_type = other DNA
cttatccatatcccaacgttcatcccgatgaacgttattataactattat

SEQ ID NO: 50856 - DNA, 50 bp, synthetic construct
  source 1..50: mol_type = other DNA
aaatgtttccgcaatgtaggaatagctactccctaatataacaagttttt

SEQ ID NO: 50857 - DNA, 50 bp, synthetic construct
  source 1..50: mol_type = other DNA
tttggtatcccgtttcttctccctccaacgagagaaatcgaggtactaaa

SEQ ID NO: 50858 - DNA, 50 bp, synthetic construct
  source 1..50: mol_type = other DNA
agaataaattttaaaacaacaaatatattagtaaataattttttagaaga

SEQ ID NO: 50859 - DNA, 50 bp, synthetic construct
  source 1..50: mol_type = other DNA
gatcgttactggccgacagcatgcggcactgaaggcggccagcttcgaac

SEQ ID NO: 50860 - DNA, 50 bp, synthetic construct
  source 1..50: mol_type = other DNA
taatgccaaaaattacaaagttttcaaataatttgtaattcgtttaaaat

SEQ ID NO: 50861 - DNA, 50 bp, synthetic construct
  source 1..50: mol_type = other DNA
tagtgggtatttaaccttcctacgtctgtaggcaatgttattacccacta

SEQ ID NO: 50862 - DNA, 50 bp, synthetic construct
  source 1..50: mol_type = other DNA
tcgccgaatagctcaaatacaatgacccttgaatgtaggctattcgggtt

SEQ ID NO: 50863 - DNA, 50 bp, synthetic construct
  source 1..50: mol_type = other DNA
cccgatgagcagcaggaaagtgcccgggtcctttccgatggccttcgggg

SEQ ID NO: 50864 - DNA, 50 bp, synthetic construct
  source 1..50: mol_type = other DNA
tccccggcaccgcgtataggtatggtgaaatatataccagctgatactac

SEQ ID NO: 50865 - DNA, 50 bp, synthetic construct
  source 1..50: mol_type = other DNA
gcgcaacagtcttcagaatgtccagctcggcaacccgaacgttagccaat

SEQ ID NO: 50866 - DNA, 50 bp, synthetic construct
  source 1..50: mol_type = other DNA
ggttaatttctaatgacgttcgggcacccgagagataccatacctatgcg

SEQ ID NO: 50867 - DNA, 50 bp, synthetic construct
  source 1..50: mol_type = other DNA
ggtggtgacgaacgggtgagtgccgcagcacccacccgctcgcgccaact

SEQ ID NO: 50868 - DNA, 50 bp, synthetic construct
  source 1..50: mol_type = other DNA
tatattggctaacgttcgggttgccgggttgccgagcgttaggcaaaata

SEQ ID NO: 50869 - DNA, 50 bp, synthetic construct
  source 1..50: mol_type = other DNA
tattttgcctaacgctcggcaacccggcaacccgaatgttagccaatata

SEQ ID NO: 50870 - DNA, 50 bp, synthetic construct
  source 1..50: mol_type = other DNA
gaaaaagaagctcaaaaagtgagagatcggaaatttttagtttcatttgt

SEQ ID NO: 50871 - DNA, 50 bp, synthetic construct
  source 1..50: mol_type = other DNA
gtttttatgctcaagaatcaagctatagacaaagtcttggagttaaaaaa

SEQ ID NO: 50872 - DNA, 50 bp, synthetic construct
  source 1..50: mol_type = other DNA
tgtatcaacgctatgcactccacatgtgtgttgtccataggataggaaca

SEQ ID NO: 50873 - DNA, 50 bp, synthetic construct
  source 1..50: mol_type = other DNA
aattttatgtaacaattgcttgacatgatgacagatacaataaatccatt

SEQ ID NO: 50874 - DNA, 50 bp, synthetic construct
  source 1..50: mol_type = other DNA
tgcaaaattttcagtacccccgcgcgcgcggcttccctgaaagcgtccag

SEQ ID NO: 50875 - DNA, 50 bp, synthetic construct
  source 1..50: mol_type = other DNA
taggtgatgaaaaatactggttgtatacaaaccagtactttaaggtgaag

SEQ ID NO: 50876 - DNA, 50 bp, synthetic construct
  source 1..50: mol_type = other DNA
cctttgctattaagtaacaatatcacaatgttgtatcatatgtaaaatta

SEQ ID NO: 50877 - DNA, 50 bp, synthetic construct
  source 1..50: mol_type = other DNA
gacacttaccatgtatggcctttctcataaggaccttaatgaggggaacc

SEQ ID NO: 50878 - DNA, 50 bp, synthetic construct
  source 1..50: mol_type = other DNA
gtttaggtgcccatgtagtgcatttaaatacaccatctaaaacgatacaa

SEQ ID NO: 50879 - DNA, 50 bp, synthetic construct
  source 1..50: mol_type = other DNA
cagcatgcggcatgcggtactgccgcggcccagccgccggccgccggctc

SEQ ID NO: 50880 - DNA, 50 bp, synthetic construct
  source 1..50: mol_type = other DNA
ccccgaaggccatcggaaaggacccgcttccgtgtttgtgcagcgagggg

SEQ ID NO: 50881 - DNA, 50 bp, synthetic construct
  source 1..50: mol_type = other DNA
cgtgtttcgatgggtgtataatattaacgtcgtcaaccccctaaaactaa

SEQ ID NO: 50882 - DNA, 50 bp, synthetic construct
  source 1..50: mol_type = other DNA
tttttcatactatcacctctttagtttaaaggaggttgctatgaaaagaa

SEQ ID NO: 50883 - DNA, 50 bp, synthetic construct
  source 1..50: mol_type = other DNA
actctcatttttccctccattatatttataaaccaacataaaagtatgac

SEQ ID NO: 50884 - DNA, 50 bp, synthetic construct
  source 1..50: mol_type = other DNA
gcctttgctgcccttaggcttagtgcactgatttctaggggaggtaagta

SEQ ID NO: 50885 - DNA, 50 bp, synthetic construct
  source 1..50: mol_type = other DNA
ttttagatggtgtatttaaacgtgtcaaggtctaaatacatctcttattt

SEQ ID NO: 50886 - DNA, 50 bp, synthetic construct
  source 1..50: mol_type = other DNA
aaagacatcatgagaggttatctccagaaataatggctagtttgggcttt

SEQ ID NO: 50887 - DNA, 50 bp, synthetic construct
  source 1..50: mol_type = other DNA
tcaattggtcagccgccatttgcagactcttatgctggcggcaccggtgc

SEQ ID NO: 50888 - DNA, 50 bp, synthetic construct
  source 1..50: mol_type = other DNA
aaaaggaacttagatggcccatgactgcttgggcaatctcagtcttgctc

SEQ ID NO: 50889 - DNA, 50 bp, synthetic construct
  source 1..50: mol_type = other DNA
gttattcaaaatcatccatctctgatgagatattgatttcacaaaatgac

SEQ ID NO: 50890 - DNA, 50 bp, synthetic construct
  source 1..50: mol_type = other DNA
aggagaacatcctttctctttttttaaaaaaaggcctgcatatagcacct

SEQ ID NO: 50891 - DNA, 50 bp, synthetic construct
  source 1..50: mol_type = other DNA
cgattcaattcatcgatttcattgatatatgagtgagataaaacgtgtcg

SEQ ID NO: 50892 - DNA, 50 bp, synthetic construct
  source 1..50: mol_type = other DNA
cctcacgcgcaagaatgctctgttcgaacaggcgggcgctgtcggtgcgg

SEQ ID NO: 50893 - DNA, 50 bp, synthetic construct
  source 1..50: mol_type = other DNA
aaccgatacactgaagcgtatcataaatgatgaggtttttttcagccgca

SEQ ID NO: 50894 - DNA, 50 bp, synthetic construct
  source 1..50: mol_type = other DNA
cgatattcataatgaaacctcctaatttttagccgtcatttatgataagg

SEQ ID NO: 50895 - DNA, 50 bp, synthetic construct
  source 1..50: mol_type = other DNA
gctcatgctgtacgccgccggaaattgcgggggcagcctctgtcactagt

SEQ ID NO: 50896 - DNA, 50 bp, synthetic construct
  source 1..50: mol_type = other DNA
aattctagaggtccagtggttgcggggcagcctctgtcaccagtagaaga

SEQ ID NO: 50897 - DNA, 50 bp, synthetic construct
  source 1..50: mol_type = other DNA
aataatttacccatgattcaaattttacgtggaatattgcatagatactc

SEQ ID NO: 50898 - DNA, 50 bp, synthetic construct
  source 1..50: mol_type = other DNA
gattttgcggacattcaaaataaaaaatcacttatcacaaatcacaaatc

SEQ ID NO: 50899 - DNA, 50 bp, synthetic construct
  source 1..50: mol_type = other DNA
gtgtattaatagaaaggtctcttcaggattacacctttcttatgatacac

SEQ ID NO: 50900 - DNA, 50 bp, synthetic construct
  source 1..50: mol_type = other DNA
ttatttatttggactaactaataatactatatgttagtccaaataattat

SEQ ID NO: 50901 - DNA, 50 bp, synthetic construct
  source 1..50: mol_type = other DNA
cagtgtctcattgatacattctctgatggaaatgtaccatcaagacacct

SEQ ID NO: 50902 - DNA, 50 bp, synthetic construct
  source 1..50: mol_type = other DNA
agtatccctcccttaatattgtttaaaaaggcaattaatcgagtaatggg

SEQ ID NO: 50903 - DNA, 50 bp, synthetic construct
  source 1..50: mol_type = other DNA
aatatagaccccgagatgggtttatataaacggattcagcagtttgtccg

SEQ ID NO: 50904 - DNA, 50 bp, synthetic construct
  source 1..50: mol_type = other DNA
ttggtctttttcttatccttttggtaaatcacagatcataaaaatagctt

SEQ ID NO: 50905 - DNA, 50 bp, synthetic construct
  source 1..50: mol_type = other DNA
actttctcagatgcccatggcaacatgacagcagaaatttatgctaaacc

SEQ ID NO: 50906 - DNA, 50 bp, synthetic construct
  source 1..50: mol_type = other DNA
aattttaagctaaatatgtaatttttaaaatacagattctacgaaaccca

SEQ ID NO: 50907 - DNA, 50 bp, synthetic construct
  source 1..50: mol_type = other DNA
gcatcactcataagccgccaattattagcatggcggcttggaaatcttgg

SEQ ID NO: 50908 - DNA, 50 bp, synthetic construct
  source 1..50: mol_type = other DNA
ccaaaagatcgtctttgatgcgttcttttgcgtgaaaggtgatctcttga

SEQ ID NO: 50909 - DNA, 50 bp, synthetic construct
  source 1..50: mol_type = other DNA
ctctatagcatccccatccacgttcgaaagattttaggacttgcagggat

SEQ ID NO: 50910 - DNA, 50 bp, synthetic construct
  source 1..50: mol_type = other DNA
tcagctttacgacataaatcagtcaatggaatcttttgcgtgaaaggtga

SEQ ID NO: 50911 - DNA, 50 bp, synthetic construct
  source 1..50: mol_type = other DNA
caatatctgaaaatagaagtccgatgacggatcaaccaacaacgagatta

SEQ ID NO: 50912 - DNA, 50 bp, synthetic construct
  source 1..50: mol_type = other DNA
attgacattgtctggaagatttaattttcgataaaaacgtcaatgtcgcc

SEQ ID NO: 50913 - DNA, 50 bp, synthetic construct
  source 1..50: mol_type = other DNA
ctttcccgcagcggctgttcgtcggtgtatgtcgttgaaaggagggaaaa

SEQ ID NO: 50914 - DNA, 50 bp, synthetic construct
  source 1..50: mol_type = other DNA
cagatttgaaaaggaatactttcccgccaaaagtaagctggcacagctat

SEQ ID NO: 50915 - DNA, 50 bp, synthetic construct
  source 1..50: mol_type = other DNA
acgatcatccctttcgtgaactctcggcgcgaaacgaaagggggccacgc

SEQ ID NO: 50916 - DNA, 50 bp, synthetic construct
  source 1..50: mol_type = other DNA
ataaacaaggttaaggtgacagctgatgtcttttcttgtacccattttat

SEQ ID NO: 50917 - DNA, 50 bp, synthetic construct
  source 1..50: mol_type = other DNA
aatttataaccgtaccgcgctggatatcccaccactaaggtttataaaag

SEQ ID NO: 50918 - DNA, 50 bp, synthetic construct
  source 1..50: mol_type = other DNA
gtttatttagattatttagtacctcgagaaactaaaattataaataaaaa

SEQ ID NO: 50919 - DNA, 50 bp, synthetic construct
  source 1..50: mol_type = other DNA
aatggtagtattatgtgcaaatgttttcacttacacataatactaccata

SEQ ID NO: 50920 - DNA, 50 bp, synthetic construct
  source 1..50: mol_type = other DNA
actattttctcataactatgcaagtactttcatagttagaactcattgat

SEQ ID NO: 50921 - DNA, 50 bp, synthetic construct
  source 1..50: mol_type = other DNA
gcaaagctagtaaaatcatagcacatgtgcctgcttttaatattatttat

SEQ ID NO: 50922 - DNA, 50 bp, synthetic construct
  source 1..50: mol_type = other DNA
taaaattttataaagagaaaataaaagctgtttttcttgtacctatttta

SEQ ID NO: 50923 - DNA, 50 bp, synthetic construct
  source 1..50: mol_type = other DNA
tgaagcggctgaaaaaaccgcatcatgatgaggtttttaaaaattcaaca

SEQ ID NO: 50924 - DNA, 50 bp, synthetic construct
  source 1..50: mol_type = other DNA
tgtcgtcaccttgttggtgtaattaggttgacgccaacagggtgataaca

SEQ ID NO: 50925 - DNA, 50 bp, synthetic construct
  source 1..50: mol_type = other DNA
ctacctgtaccagcattattaagcacgcttaaccagtacaaagcaggtaa

SEQ ID NO: 50926 - DNA, 50 bp, synthetic construct
  source 1..50: mol_type = other DNA
caggagaacaatgatatgagtgttaagacactctcaatcgcattctgaca

SEQ ID NO: 50927 - DNA, 50 bp, synthetic construct
  source 1..50: mol_type = other DNA
tttttgttgtgtgtttgaaaacctatgggttttcaaccacacaacaaatg

SEQ ID NO: 50928 - DNA, 50 bp, synthetic construct
  source 1..50: mol_type = other DNA
tccccaagataatagccgcacgggtgcccgtgcagataacacctcgggaa

SEQ ID NO: 50929 - DNA, 50 bp, synthetic construct
  source 1..50: mol_type = other DNA
gatcggcggcccacgttcatttttcaaaaactgcacgttttaactgcaat

SEQ ID NO: 50930 - DNA, 50 bp, synthetic construct
  source 1..50: mol_type = other DNA
tatgctcggaaatggtatgcattttaaaatgtacaagataaataggtata

SEQ ID NO: 50931 - DNA, 50 bp, synthetic construct
  source 1..50: mol_type = other DNA
ttcaatccctaagtgaacgcttctttaggggcggtcaaatagggatttat

SEQ ID NO: 50932 - DNA, 50 bp, synthetic construct
  source 1..50: mol_type = other DNA
tcgttatcatgtttgcaatactagctgatattattcacacatgagaaaat

SEQ ID NO: 50933 - DNA, 50 bp, synthetic construct
  source 1..50: mol_type = other DNA
gttcttccagcctcctgtcatcgcctcccacgataagaggctggtcgaga

SEQ ID NO: 50934 - DNA, 50 bp, synthetic construct
  source 1..50: mol_type = other DNA
atggaacctttaacatagcacgtctggacgtgttctgcgataggttccac

SEQ ID NO: 50935 - DNA, 50 bp, synthetic construct
  source 1..50: mol_type = other DNA
cgagtccatcttgagtcttctttctcgcaagacaatacaaaatagacaca

SEQ ID NO: 50936 - DNA, 50 bp, synthetic construct
  source 1..50: mol_type = other DNA
taaggacggaacaaaggacaatgatcttcatgtccgtttatttatccttc

SEQ ID NO: 50937 - DNA, 50 bp, synthetic construct
  source 1..50: mol_type = other DNA
aataagaaactctttgaaattattttaataatagactggatattcagatt

SEQ ID NO: 50938 - DNA, 50 bp, synthetic construct
  source 1..50: mol_type = other DNA
ctcggctgttccactaagaacggctcacagtttttgggggaaatgccgta

SEQ ID NO: 50939 - DNA, 50 bp, synthetic construct
  source 1..50: mol_type = other DNA
aattgagtaccaagataaaccgacaaagcggtatatcatgatgcttaata

SEQ ID NO: 50940 - DNA, 50 bp, synthetic construct
  source 1..50: mol_type = other DNA
agtgccaaatttcaggatgtgtcaatagacacacccataatttattcaac

SEQ ID NO: 50941 - DNA, 50 bp, synthetic construct
  source 1..50: mol_type = other DNA
aacggcccagacgagaagctcagtgtatatgggaaggcgtctacttcgtc

SEQ ID NO: 50942 - DNA, 50 bp, synthetic construct
  source 1..50: mol_type = other DNA
tttcagcgccggacgcttgtttgagatgttcaaacatgcgacatctgcag

SEQ ID NO: 50943 - DNA, 50 bp, synthetic construct
  source 1..50: mol_type = other DNA
tcaacgatggctttggaaaaccttatcggcatcgccattggtatcgatga

SEQ ID NO: 50944 - DNA, 50 bp, synthetic construct
  source 1..50: mol_type = other DNA
ttgccgaggtggagggttcggatttaatccgaacccggttccaatagggg

SEQ ID NO: 50945 - DNA, 50 bp, synthetic construct
  source 1..50: mol_type = other DNA
aatcatcttgacaaactcgttcccgagggctatactttagtaagacgata

SEQ ID NO: 50946 - DNA, 50 bp, synthetic construct
  source 1..50: mol_type = other DNA
gccccggcgtccagcgcctctttggccaaaatggcggctgaagcggatta

SEQ ID NO: 50947 - DNA, 50 bp, synthetic construct
  source 1..50: mol_type = other DNA
ataactcaaaaaggcacttgacaaaactgtaaacaacacctttatagacg

SEQ ID NO: 50948 - DNA, 50 bp, synthetic construct
  source 1..50: mol_type = other DNA
agtaaattagttccttatcactgttaatagtgacaagtaactattttgtc

SEQ ID NO: 50949 - DNA, 50 bp, synthetic construct
  source 1..50: mol_type = other DNA
actaaattttgtgttttaaaaatctggatttttatctataccaaccctgt

SEQ ID NO: 50950 - DNA, 50 bp, synthetic construct
  source 1..50: mol_type = other DNA
tagtcttctttacctgccaaatacaacggattgtcattgatataatcagt

SEQ ID NO: 50951 - DNA, 50 bp, synthetic construct
  source 1..50: mol_type = other DNA
tttatgcgggtcttaggaatatcccttgattttcaactatttttaacgac

SEQ ID NO: 50952 - DNA, 50 bp, synthetic construct
  source 1..50: mol_type = other DNA
atcttgtttttagagttcatcgtgcacccgaatgtctttaaaaacaaggt

SEQ ID NO: 50953 - DNA, 50 bp, synthetic construct
  source 1..50: mol_type = other DNA
aagataaaaatattttctccaaagatctttgaaaaaaataaaattatacc

SEQ ID NO: 50954 - DNA, 50 bp, synthetic construct
  source 1..50: mol_type = other DNA
gaagctaaacacatttctatttacaatatccattatttgtgataaggttc

SEQ ID NO: 50955 - DNA, 50 bp, synthetic construct
  source 1..50: mol_type = other DNA
ctaaaataaaatacatataacatgaatatgttgtatgtagttgtattaaa

SEQ ID NO: 50956 - DNA, 50 bp, synthetic construct
  source 1..50: mol_type = other DNA
ataggaactttaatacatttatctgaagatatatatattaaaatataact

SEQ ID NO: 50957 - DNA, 50 bp, synthetic construct
  source 1..50: mol_type = other DNA
aactggcatcttattatctgcctttcctgtgtgaattgaatgcccaagtt

SEQ ID NO: 50958 - DNA, 50 bp, synthetic construct
  source 1..50: mol_type = other DNA
atcactctaaaagctattaatagcaagctattttatggtttaatgaggat

SEQ ID NO: 50959 - DNA, 50 bp, synthetic construct
  source 1..50: mol_type = other DNA
ctttagatggtgtatttaaacgtgtcaaggtctaaatacactatgaggat

SEQ ID NO: 50960 - DNA, 50 bp, synthetic construct
  source 1..50: mol_type = other DNA
ttctagacacatcagtgttacttacacatgtaacactgatcccctgttac

SEQ ID NO: 50961 - DNA, 50 bp, synthetic construct
  source 1..50: mol_type = other DNA
gcctcatcttttcagtgttacttacacatgtaacactgatcacctgttac

SEQ ID NO: 50962 - DNA, 50 bp, synthetic construct
  source 1..50: mol_type = other DNA
agggccggaaatctttgtatctagagatggatacaaagcctggggtgggt

SEQ ID NO: 50963 - DNA, 50 bp, synthetic construct
  source 1..50: mol_type = other DNA
tcttaaaaaatatcattatttatgatcatgagtgaatgatatttataaat

SEQ ID NO: 50964 - DNA, 50 bp, synthetic construct
  source 1..50: mol_type = other DNA
atcccaaataaaatcagtgataacatgttatcactgaggaagtttcggaa

SEQ ID NO: 50965 - DNA, 50 bp, synthetic construct
  source 1..50: mol_type = other DNA
tttgctcacacataactaggcgcatatgtagggaatacaatgcgaaataa

SEQ ID NO: 50966 - DNA, 50 bp, synthetic construct
  source 1..50: mol_type = other DNA
tttgtggtctttaagacaatcggatctccttttgcatttaaagacataac

SEQ ID NO: 50967 - DNA, 50 bp, synthetic construct
  source 1..50: mol_type = other DNA
tttagtacctcgttttctctcgttggagggagaagaaacgggataccaaa

SEQ ID NO: 50968 - DNA, 50 bp, synthetic construct
  source 1..50: mol_type = other DNA
agttttatttgtggtacgcttcgcctgcatatcggttaatgatgcggttt

SEQ ID NO: 50969 - DNA, 50 bp, synthetic construct
  source 1..50: mol_type = other DNA
ttaaatcaaaatgttcccatagtataatcaatgggaacatttgaattttc

SEQ ID NO: 50970 - DNA, 50 bp, synthetic construct
  source 1..50: mol_type = other DNA
tagtcagtatctcgataaacagataaagctgtttttaaagatactgacta

SEQ ID NO: 50971 - DNA, 50 bp, synthetic construct
  source 1..50: mol_type = other DNA
aatctaattatgatgtgactcttatttaagagtaacaattgcacaacctg

SEQ ID NO: 50972 - DNA, 50 bp, synthetic construct
  source 1..50: mol_type = other DNA
gcaaaaaatcaagagttttagatatgtatctaaaactcttagtaactagc

SEQ ID NO: 50973 - DNA, 50 bp, synthetic construct
  source 1..50: mol_type = other DNA
tatctgtcatatttagatacacgtatcagcgtatctaaaattgacattta

SEQ ID NO: 50974 - DNA, 50 bp, synthetic construct
  source 1..50: mol_type = other DNA
tacgagcagagtaacacactccacgtgtgtagtctgttccttgagaatac

SEQ ID NO: 50975 - DNA, 50 bp, synthetic construct
  source 1..50: mol_type = other DNA
ggcttttacgagcagtgcgacacactatgtgtgctgagagcttacttcta

SEQ ID NO: 50976 - DNA, 50 bp, synthetic construct
  source 1..50: mol_type = other DNA
actccctttcgttctatagtatataaatacgcatcacgtcgagtgtgtcg

SEQ ID NO: 50977 - DNA, 50 bp, synthetic construct
  source 1..50: mol_type = other DNA
ttaatcaggcggattttatttcttgatataaatccaatcttagacatttt

SEQ ID NO: 50978 - DNA, 50 bp, synthetic construct
  source 1..50: mol_type = other DNA
attattttgattgttttttaatctaatgatataaatccaatctttgccat

SEQ ID NO: 50979 - DNA, 50 bp, synthetic construct
  source 1..50: mol_type = other DNA
ttgtatcgctttaggtagtgtatttaaatacacctattatttcagatggt

SEQ ID NO: 50980 - DNA, 50 bp, synthetic construct
  source 1..50: mol_type = other DNA
aaaagttaagttgtattgtatcaattttgatacaatttaaccattgcaag

SEQ ID NO: 50981 - DNA, 50 bp, synthetic construct
  source 1..50: mol_type = other DNA
ataacaggtttcttagaaaaccgaattcggcattgtagcattagccataa

SEQ ID NO: 50982 - DNA, 50 bp, synthetic construct
  source 1..50: mol_type = other DNA
tacagtaatttactgttaattaccaccatgatatacttctttttactgtt

SEQ ID NO: 50983 - DNA, 50 bp, synthetic construct
  source 1..50: mol_type = other DNA
tatgacggtacaaatttatgatgtatacatattctttatcggacataatg

SEQ ID NO: 50984 - DNA, 50 bp, synthetic construct
  source 1..50: mol_type = other DNA
tccattcttcggcaacgtgatgcaggtgaaatgcgctaaaaaagagacgt

SEQ ID NO: 50985 - DNA, 50 bp, synthetic construct
  source 1..50: mol_type = other DNA
cgtcgttttcgtctcgtgcaatctgcaatattccagatccgagcgcgacc

SEQ ID NO: 50986 - DNA, 50 bp, synthetic construct
  source 1..50: mol_type = other DNA
aatatgtattctatagtacgctggaagcagcgtaaagtgaaatacatctg

SEQ ID NO: 50987 - DNA, 50 bp, synthetic construct
  source 1..50: mol_type = other DNA
atttgtttgtagaacacatcatacataacggctaatgtaaacaaacaaat

SEQ ID NO: 50988 - DNA, 50 bp, synthetic construct
  source 1..50: mol_type = other DNA
acgccgaatagctcaaatacaatgactattgaatggagtctgctcggtaa

SEQ ID NO: 50989 - DNA, 50 bp, synthetic construct
  source 1..50: mol_type = other DNA
aaaatgtcttagtgttggtaataactttattaccaacagtattgcagatt

SEQ ID NO: 50990 - DNA, 50 bp, synthetic construct
  source 1..50: mol_type = other DNA
agtgattcacatcacatgcacacctaggtgtgcatatggtggtaacctct

SEQ ID NO: 50991 - DNA, 50 bp, synthetic construct
  source 1..50: mol_type = other DNA
aaggtggtttattgacataggttgataaacctatgtcaatagactaccat

SEQ ID NO: 50992 - DNA, 50 bp, synthetic construct
  source 1..50: mol_type = other DNA
aggagttataaaatgtagtataacatgattgacgacattaaaaataattt

SEQ ID NO: 50993 - DNA, 50 bp, synthetic construct
  source 1..50: mol_type = other DNA
catttttcaaactaatgtatcacactagtgagatattagatcatctttag

SEQ ID NO: 50994 - DNA, 50 bp, synthetic construct
  source 1..50: mol_type = other DNA
ttcaacgatgaacaactttgggtaattccctaaactttggtaaaatcccc

SEQ ID NO: 50995 - DNA, 50 bp, synthetic construct
  source 1..50: mol_type = other DNA
aggagttatataatgtagtataacatgattgacgacattaaaaataattt

SEQ ID NO: 50996 - DNA, 50 bp, synthetic construct
  source 1..50: mol_type = other DNA
atgcattgaaatgagtatgttactaaagtactatacagattatgatgcac

SEQ ID NO: 50997 - DNA, 50 bp, synthetic construct
  source 1..50: mol_type = other DNA
ggtcttttaggttccaaaagtagtaaaagaaatcttagatataatagacc

SEQ ID NO: 50998 - DNA, 50 bp, synthetic construct
  source 1..50: mol_type = other DNA
ggggattttaccaaagtttagggaattgtccattcccaaaatacaaaaaa

SEQ ID NO: 50999 - DNA, 50 bp, synthetic construct
  source 1..50: mol_type = other DNA
aaattatttttaatgtcgtcaatcatgttatactacattttataactcct

SEQ ID NO: 51000 - DNA, 50 bp, synthetic construct
  source 1..50: mol_type = other DNA
tttatcgcttggtattcttctttgtacaaacaaaaattagaaggtttaac

SEQ ID NO: 51001 - DNA, 50 bp, synthetic construct
  source 1..50: mol_type = other DNA
cttttgtaaaatgatactattacccggagaacagtttcattttgacaaaa

SEQ ID NO: 51002 - DNA, 50 bp, synthetic construct
  source 1..50: mol_type = other DNA
caaaaaatgtttcgagatttgttcggctactaaacaggacaaatgaaatt

SEQ ID NO: 51003 - DNA, 50 bp, synthetic construct
  source 1..50: mol_type = other DNA
taaacattaatgttaatgcaagtaaagaatagcagtgtagttattgttta

SEQ ID NO: 51004 - DNA, 50 bp, synthetic construct
  source 1..50: mol_type = other DNA
aaagataatatatatttgtgagtaaattgctacatgagtaatatctgatt

SEQ ID NO: 51005 - DNA, 50 bp, synthetic construct
  source 1..50: mol_type = other DNA
agaaaatatacatggtaaaaagttctgtaattttacaatttaaaaataac

SEQ ID NO: 51006 - DNA, 50 bp, synthetic construct
  source 1..50: mol_type = other DNA
ttttattacgttaaattgtatcaattataatacaatttacccaaattcct

SEQ ID NO: 51007 - DNA, 50 bp, synthetic construct
  source 1..50: mol_type = other DNA
cgaggacaaaaaattgtattctcaagtgttgctacaacgaagcaaagggt

SEQ ID NO: 51008 - DNA, 50 bp, synthetic construct
  source 1..50: mol_type = other DNA
gtttgtattaatagtactatatatacccaaatcaaaacactaatacaagc

SEQ ID NO: 51009 - DNA, 50 bp, synthetic construct
  source 1..50: mol_type = other DNA
tacccctttttaatttaattgcattacaaagagtttattagcaagaagta

SEQ ID NO: 51010 - DNA, 50 bp, synthetic construct
  source 1..50: mol_type = other DNA
ctttaggtagtgtatttaaatgtgtcaaggtctaaatacactatgaggtt

SEQ ID NO: 51011 - DNA, 50 bp, synthetic construct
  source 1..50: mol_type = other DNA
atcctcatagtgcatttagaccttgacacgtttaaatacactacctaaag

SEQ ID NO: 51012 - DNA, 50 bp, synthetic construct
  source 1..50: mol_type = other DNA
gcttagttgcgtaagcacggcacaggcgtggccggtttcgtggactatgc

SEQ ID NO: 51013 - DNA, 50 bp, synthetic construct
  source 1..50: mol_type = other DNA
tcctgcgccagcgcgacggcttcgtcagatgccgtcggttcttcgttttc

SEQ ID NO: 51014 - DNA, 50 bp, synthetic construct
  source 1..50: mol_type = other DNA
gcataataaatgaaaatttatttaattccataagtttaaaattaatatta

SEQ ID NO: 51015 - DNA, 50 bp, synthetic construct
  source 1..50: mol_type = other DNA
gaaatctatgttcttatgtctagtattttacattatttaagacagagtta

SEQ ID NO: 51016 - DNA, 50 bp, synthetic construct
  source 1..50: mol_type = other DNA
cacctccaattattataatcttcatatgatgattaaaagaggagaagaat

SEQ ID NO: 51017 - DNA, 50 bp, synthetic construct
  source 1..50: mol_type = other DNA
aatattcagttccagcatctatacaagtatagaaacagaaaaaggacttt

SEQ ID NO: 51018 - DNA, 50 bp, synthetic construct
  source 1..50: mol_type = other DNA
acatttatctttttcatctctcatatatataaccagaaaaaacaccctac

SEQ ID NO: 51019 - DNA, 50 bp, synthetic construct
  source 1..50: mol_type = other DNA
cggattgagggcattatttctgccagcttagcattaatgctttcaataga

SEQ ID NO: 51020 - DNA, 50 bp, synthetic construct
  source 1..50: mol_type = other DNA
cacctaaactgttatataattctttataaccttagctaaccttgtgggtg

SEQ ID NO: 51021 - DNA, 50 bp, synthetic construct
  source 1..50: mol_type = other DNA
tttcagatggtgtatttaaacgtgtcaaggtctaaatacactatgagaac

SEQ ID NO: 51022 - DNA, 50 bp, synthetic construct
  source 1..50: mol_type = other DNA
acacatcaataatgtttactctttatgaaggatcaacatagtacaatagc

SEQ ID NO: 51023 - DNA, 50 bp, synthetic construct
  source 1..50: mol_type = other DNA
taaacaattttactatcctgtatttcaataaaagatactaaaattctttg

SEQ ID NO: 51024 - DNA, 50 bp, synthetic construct
  source 1..50: mol_type = other DNA
aaaaaaccgcatcatttatgatatgcctctccttgttagtgatattgcta

SEQ ID NO: 51025 - DNA, 50 bp, synthetic construct
  source 1..50: mol_type = other DNA
tttttgttctttagtgttcttaacttgtagacctatatacactacacgga

SEQ ID NO: 51026 - DNA, 50 bp, synthetic construct
  source 1..50: mol_type = other DNA
ggagaagtgtatcataagagggtataacctttctaatgatacactctaaa

SEQ ID NO: 51027 - DNA, 50 bp, synthetic construct
  source 1..50: mol_type = other DNA
atgttgtaataagcgatacacactcaagtgtgttatgtttatacaaacaa

SEQ ID NO: 51028 - DNA, 50 bp, synthetic construct
  source 1..50: mol_type = other DNA
atgctacaacgccgaatagctcaaatggagtctactcggttttttatttt

SEQ ID NO: 51029 - DNA, 50 bp, synthetic construct
  source 1..50: mol_type = other DNA
atgttgtaataagcgatacacattcaaatgtgttatgcttatacaaacaa

SEQ ID NO: 51030 - DNA, 50 bp, synthetic construct
  source 1..50: mol_type = other DNA
tgtgttccaatagtagtaacgacacatgtcgagacttgtgtgttgctaca

SEQ ID NO: 51031 - DNA, 50 bp, synthetic construct
  source 1..50: mol_type = other DNA
gtctgatgatttcgtgacgttgctggatcacaacaatgaaagcagcaatt

SEQ ID NO: 51032 - DNA, 50 bp, synthetic construct
  source 1..50: mol_type = other DNA
ctcgcccgaatggacggcggagcttgagctcttcggtccgatcgatccca

SEQ ID NO: 51033 - DNA, 50 bp, synthetic construct
  source 1..50: mol_type = other DNA
atcctaccttgacaaatcctcacagatgtaatacactttgagagtaggca

SEQ ID NO: 51034 - DNA, 50 bp, synthetic construct
  source 1..50: mol_type = other DNA
agtttttcttttgtagcaacacgatactatatgaacacaattcggtagcc

SEQ ID NO: 51035 - DNA, 50 bp, synthetic construct
  source 1..50: mol_type = other DNA
caatatctttaactaagggaaactgggggttcacttagataaagatacca

SEQ ID NO: 51036 - DNA, 50 bp, synthetic construct
  source 1..50: mol_type = other DNA
agtttggacaataaacataccgtctcaacatgttcactgttgtccaaacc

SEQ ID NO: 51037 - DNA, 50 bp, synthetic construct
  source 1..50: mol_type = other DNA
tttcgacgtagcaacaccacagtctctcacaatgtgtttgaactactata

SEQ ID NO: 51038 - DNA, 50 bp, synthetic construct
  source 1..50: mol_type = other DNA
gacattcattctgtcctctcaagccatgtggagacggtagtattgatgtc

SEQ ID NO: 51039 - DNA, 50 bp, synthetic construct
  source 1..50: mol_type = other DNA
gacatcaatactaccgtctccacatggcttgagaggacagaatgaatgtc

SEQ ID NO: 51040 - DNA, 50 bp, synthetic construct
  source 1..50: mol_type = other DNA
tccgtctggctttttgtgggaaagcaaagactcacaaagctccagacagc

SEQ ID NO: 51041 - DNA, 50 bp, synthetic construct
  source 1..50: mol_type = other DNA
aagttttttattatgttccctttgtacaaggggtacaaacaagataaaat

SEQ ID NO: 51042 - DNA, 50 bp, synthetic construct
  source 1..50: mol_type = other DNA
taaatcgtgggtattattcctacgatccacgaaaagatattgactattta

SEQ ID NO: 51043 - DNA, 50 bp, synthetic construct
  source 1..50: mol_type = other DNA
ttatgttcacatagtagttcaaacacatgtggagacttgtgtgttgctac

SEQ ID NO: 51044 - DNA, 50 bp, synthetic construct
  source 1..50: mol_type = other DNA
gtgtcatttacacttaaaattatgcaagtgcttttttgagttattgacgc

SEQ ID NO: 51045 - DNA, 50 bp, synthetic construct
  source 1..50: mol_type = other DNA
atctttaactaagggaaacgggacaactgggggttcacttagataaagat

SEQ ID NO: 51046 - DNA, 50 bp, synthetic construct
  source 1..50: mol_type = other DNA
ttgataaattaagttacgctattttcaatgcaagaaagtaaatttgtcaa

SEQ ID NO: 51047 - DNA, 50 bp, synthetic construct
  source 1..50: mol_type = other DNA
tcaaatggaagatataaagaattttaaaaatatctattttttaaaaaagt

SEQ ID NO: 51048 - DNA, 50 bp, synthetic construct
  source 1..50: mol_type = other DNA
agccgtctgttcaattggtagcggggtatctaccattggttacagctttc

SEQ ID NO: 51049 - DNA, 50 bp, synthetic construct
  source 1..50: mol_type = other DNA
cacatacagcctagttatattggcatcgctatataacccggatcgagcaa

SEQ ID NO: 51050 - DNA, 50 bp, synthetic construct
  source 1..50: mol_type = other DNA
gttagtgattagagagttgtaattaggactacacatctcttatgataaac

SEQ ID NO: 51051 - DNA, 50 bp, synthetic construct
  source 1..50: mol_type = other DNA
gtgtagttccttgtaaactgacctaaagtacagtttacaagggactacac

SEQ ID NO: 51052 - DNA, 50 bp, synthetic construct
  source 1..50: mol_type = other DNA
tcttaactatcttcgcacagcattcacatgccttgagtgctgagtgtaga

SEQ ID NO: 51053 - DNA, 50 bp, synthetic construct
  source 1..50: mol_type = other DNA
taagatttttagggcgttttttatattataaaaatacactaaatttctga

SEQ ID NO: 51054 - DNA, 50 bp, synthetic construct
  source 1..50: mol_type = other DNA
aaacatccctatcaaacccttacattagcaaggttttgataaggatggta

SEQ ID NO: 51055 - DNA, 50 bp, synthetic construct
  source 1..50: mol_type = other DNA
ctacatagttcgtctttgtagcaacattgtccaaacttatatttagatcc

SEQ ID NO: 51056 - DNA, 50 bp, synthetic construct
  source 1..50: mol_type = other DNA
gtattattcctatgattcgtctccacgaaaaagaattatcacaatgtgat

SEQ ID NO: 51057 - DNA, 50 bp, synthetic construct
  source 1..50: mol_type = other DNA
caaaaggcgtttgttccacctagcccgtggtagctagaagttcgattatc

SEQ ID NO: 51058 - DNA, 50 bp, synthetic construct
  source 1..50: mol_type = other DNA
ttatgctaaaacagatgttagaaaatttggaataaaagactttaaaatta

SEQ ID NO: 51059 - DNA, 50 bp, synthetic construct
  source 1..50: mol_type = other DNA
atagtttttcgttgtagcaacacacatgtgtcgttactactatcggaaca

SEQ ID NO: 51060 - DNA, 50 bp, synthetic construct
  source 1..50: mol_type = other DNA
cgacatcaagtttggacaataatgctcatcattttccaaacttatattaa

SEQ ID NO: 51061 - DNA, 50 bp, synthetic construct
  source 1..50: mol_type = other DNA
cgacatcaagtttggacaatagtgcttatcattgtccaaacttatattta

SEQ ID NO: 51062 - DNA, 50 bp, synthetic construct
  source 1..50: mol_type = other DNA
tttggacaataaacataccgtctctactatcggaacacattttatcaacc

SEQ ID NO: 51063 - DNA, 50 bp, synthetic construct
  source 1..50: mol_type = other DNA
gtgtagtcccttgtaaactgtactttaggtcagtttacaaggaactacac

SEQ ID NO: 51064 - DNA, 50 bp, synthetic construct
  source 1..50: mol_type = other DNA
atcttgcggcagagagaaaaattctatattttttattgatttgataggcg

SEQ ID NO: 51065 - DNA, 50 bp, synthetic construct
  source 1..50: mol_type = other DNA
tcatatctttaactaagggaaagtggagtttcactaattttaaaatattg

SEQ ID NO: 51066 - DNA, 50 bp, synthetic construct
  source 1..50: mol_type = other DNA
atcatataattttgaagaattaatagagcaattcttgaaaatagttagat

SEQ ID NO: 51067 - DNA, 50 bp, synthetic construct
  source 1..50: mol_type = other DNA
cagtgataatatatatttatagatgagataatatatatttgatttgtcat

SEQ ID NO: 51068 - DNA, 50 bp, synthetic construct
  source 1..50: mol_type = other DNA
ggcgtggcgacgctatgacgcggcgcgccgcgatcatgaggcggccctgg

SEQ ID NO: 51069 - DNA, 50 bp, synthetic construct
  source 1..50: mol_type = other DNA
tatgtccaaccacttcccgttcagggttgaacgcgctcccgatggacact

SEQ ID NO: 51070 - DNA, 50 bp, synthetic construct
  source 1..50: mol_type = other DNA
acttccttaccatacgatttctttataaaggcattcagtcttccggaagg

SEQ ID NO: 51071 - DNA, 50 bp, synthetic construct
  source 1..50: mol_type = other DNA
attcgaactcctgacccccagattcgaacctgggaacgtcggcttcgatc

SEQ ID NO: 51072 - DNA, 50 bp, synthetic construct
  source 1..50: mol_type = other DNA
accccctaacgagattactccaccgtaacggactgttttcgttagggggt

SEQ ID NO: 51073 - DNA, 50 bp, synthetic construct
  source 1..50: mol_type = other DNA
ataagtttggattttccactaagcaaagtcttttgtttttccagttatat

SEQ ID NO: 51074 - DNA, 50 bp, synthetic construct
  source 1..50: mol_type = other DNA
attttatcttgtttgtaccccttgtacaaagggaacataataaaaaactt

SEQ ID NO: 51075 - DNA, 50 bp, synthetic construct
  source 1..50: mol_type = other DNA
ttgtgggaaagcagtactaccgtctcgttactactatcggaacacatttt

SEQ ID NO: 51076 - DNA, 50 bp, synthetic construct
  source 1..50: mol_type = other DNA
taaatataagtttggacaatgataagcactattgtccaaacttgatgtcg

SEQ ID NO: 51077 - DNA, 50 bp, synthetic construct
  source 1..50: mol_type = other DNA
atattctgaatatttttgtccagttcaccatgaaaaaagccatagcatat

SEQ ID NO: 51078 - DNA, 50 bp, synthetic construct
  source 1..50: mol_type = other DNA
agcctgcctattcggcagaccattcgaaactggttccccctagtggataa

SEQ ID NO: 51079 - DNA, 50 bp, synthetic construct
  source 1..50: mol_type = other DNA
agtttggacaataatgctaccgtctcgttactactatcggaacacatttt

SEQ ID NO: 51080 - DNA, 50 bp, synthetic construct
  source 1..50: mol_type = other DNA
atataatgcaattctcctgtttcatcatcaacagttataacgccatctat

SEQ ID NO: 51081 - DNA, 50 bp, synthetic construct
  source 1..50: mol_type = other DNA
aatccacttaatggtaaataaaaaagtttttgaaaagagttaaaacatcg

SEQ ID NO: 51082 - DNA, 50 bp, synthetic construct
  source 1..50: mol_type = other DNA
aaaaataataatgcctgaattcccttaagtattcaatcattatcattcca

SEQ ID NO: 51083 - DNA, 50 bp, synthetic construct
  source 1..50: mol_type = other DNA
aatatattgtatcaaaaatttattttaataaatatatgtagctatattca

SEQ ID NO: 51084 - DNA, 50 bp, synthetic construct
  source 1..50: mol_type = other DNA
cttcccggaaatcagaataatagagctcatacattcttatgaccttgggg

SEQ ID NO: 51085 - DNA, 50 bp, synthetic construct
  source 1..50: mol_type = other DNA
ttactaatatccaatttatcctgattataggataaaatcctaaatttcaa

SEQ ID NO: 51086 - DNA, 50 bp, synthetic construct
  source 1..50: mol_type = other DNA
tttccttttgaaaaagataaaaaaataccattactgtcatcctcaacaat

SEQ ID NO: 51087 - DNA, 50 bp, synthetic construct
  source 1..50: mol_type = other DNA
attgaatagataaatatgaatttgtataaaattatgagtgattattgctc

SEQ ID NO: 51088 - DNA, 50 bp, synthetic construct
  source 1..50: mol_type = other DNA
tgatttttattgtagccgtattcctcccatactatcctcaataataattg

SEQ ID NO: 51089 - DNA, 50 bp, synthetic construct
  source 1..50: mol_type = other DNA
atacaaaattcggacgtcttcgcatttcggaagatacccgaaattatcac

SEQ ID NO: 51090 - DNA, 50 bp, synthetic construct
  source 1..50: mol_type = other DNA
gaagatcaatagcatggagcgagaaactgtgggtcataacgatgatgatc

SEQ ID NO: 51091 - DNA, 50 bp, synthetic construct
  source 1..50: mol_type = other DNA
aaacaagaaagtaaaaacacgctccggagcgcggttttaatctttttaca

SEQ ID NO: 51092 - DNA, 50 bp, synthetic construct
  source 1..50: mol_type = other DNA
gggctttttgtgggaaagcagtactactatcggaacacattttatcaacc

SEQ ID NO: 51093 - DNA, 50 bp, synthetic construct
  source 1..50: mol_type = other DNA
ggttaataatttgtgttcctatcctagcgttgatacaaagagtgaaatcg

SEQ ID NO: 51094 - DNA, 50 bp, synthetic construct
  source 1..50: mol_type = other DNA
ggatttcaagccttactttcgacgtactatgtgaacataaattttcaacc

SEQ ID NO: 51095 - DNA, 50 bp, synthetic construct
  source 1..50: mol_type = other DNA
aaacacgctccgttggaggtgtaacgtatcacaagtaagtgcgaacttta

SEQ ID NO: 51096 - DNA, 50 bp, synthetic construct
  source 1..50: mol_type = other DNA
aaattgtgtttacatagtagctccgaatacgcctcatgtggagacggtag

SEQ ID NO: 51097 - DNA, 50 bp, synthetic construct
  source 1..50: mol_type = other DNA
atataattaaatttggttacatcccatcatctacccttttttctgtttat

SEQ ID NO: 51098 - DNA, 50 bp, synthetic construct
  source 1..50: mol_type = other DNA
agtttttcttttgtatcaacacaatactatgtaaacacaatttgttatcc

SEQ ID NO: 51099 - DNA, 50 bp, synthetic construct
  source 1..50: mol_type = other DNA
tacttaaatttggttacatccccgcttcatcatgtacccaagcatatttt

SEQ ID NO: 51100 - DNA, 50 bp, synthetic construct
  source 1..50: mol_type = other DNA
ccgagtaaaaatagaaaattaacatttgtaatctttctatttttattggc

SEQ ID NO: 51101 - DNA, 50 bp, synthetic construct
  source 1..50: mol_type = other DNA
tgtcatcaccctgttggggtcaacctaattacaccaacaaggtgacgaca

SEQ ID NO: 51102 - DNA, 50 bp, synthetic construct
  source 1..50: mol_type = other DNA
tcttataaaccgaaaaaagggtagatataaccatgcttccgtcatttaaa

SEQ ID NO: 51103 - DNA, 50 bp, synthetic construct
  source 1..50: mol_type = other DNA
acattaagtttggacaataacgctacagaatgaatgtcatttgagtacgt

SEQ ID NO: 51104 - DNA, 50 bp, synthetic construct
  source 1..50: mol_type = other DNA
tgtcgtcaccttgttggtgtaattaggttgacgccaacagggtgatgaca

SEQ ID NO: 51105 - DNA, 50 bp, synthetic construct
  source 1..50: mol_type = other DNA
gcgaaaaacctcatttacttatgataacacatctaaatgaggtttttaac

SEQ ID NO: 51106 - DNA, 50 bp, synthetic construct
  source 1..50: mol_type = other DNA
taaaaaaatagaagtttcaccagaaatctggtgaaacttttaatataaaa

SEQ ID NO: 51107 - DNA, 50 bp, synthetic construct
  source 1..50: mol_type = other DNA
tatttgcaatccctacacataacatttgagatgtgtagtgattgcaaata

SEQ ID NO: 51108 - DNA, 50 bp, synthetic construct
  source 1..50: mol_type = other DNA
atataattaaatttggttatatcccatcatctacccttttttcggtttat

SEQ ID NO: 51109 - DNA, 50 bp, synthetic construct
  source 1..50: mol_type = other DNA
tgtcgtcaccttgttggtgtaattaggtttacaccaacatgatgacacca

SEQ ID NO: 51110 - DNA, 50 bp, synthetic construct
  source 1..50: mol_type = other DNA
agggtacatccctgccaactaaaccagtacaaccgtacatcatctaccct

SEQ ID NO: 51111 - DNA, 50 bp, synthetic construct
  source 1..50: mol_type = other DNA
tagccaaaatgatttaaaagtgtttgaacactttaaaatcaattcactag

SEQ ID NO: 51112 - DNA, 50 bp, synthetic construct
  source 1..50: mol_type = other DNA
tgatttaaaagtgtttggtttactaaagcgatatgaacactttcaaatca

SEQ ID NO: 51113 - DNA, 50 bp, synthetic construct
  source 1..50: mol_type = other DNA
tgttgtgcataaatacacggctctactgccccgtcaatatatgcacaaca

SEQ ID NO: 51114 - DNA, 50 bp, synthetic construct
  source 1..50: mol_type = other DNA
agtttggacaataacgctaccgtctcgttactactatcggaacacatttt

SEQ ID NO: 51115 - DNA, 50 bp, synthetic construct
  source 1..50: mol_type = other DNA
aaaatagggaaagttagaaatatattgagatttcatatattccaagggat

SEQ ID NO: 51116 - DNA, 50 bp, synthetic construct
  source 1..50: mol_type = other DNA
aatgtcacaaagaaaaataggattgaaacgaaattataaatatatattat

SEQ ID NO: 51117 - DNA, 50 bp, synthetic construct
  source 1..50: mol_type = other DNA
attactgttttatccagcccctgcatggcaacactggataaaacagtaat

SEQ ID NO: 51118 - DNA, 50 bp, synthetic construct
  source 1..50: mol_type = other DNA
ttgtaatagattaacaacttcatttatatattatccatatgatgttacaa

SEQ ID NO: 51119 - DNA, 50 bp, synthetic construct
  source 1..50: mol_type = other DNA
agtttggacaataaacataccgtctcaacatgattatcattgtccaaacc

SEQ ID NO: 51120 - DNA, 50 bp, synthetic construct
  source 1..50: mol_type = other DNA
ttaatataagtttggaaaatgatgagcgttattgtccaaacttaatgtcg

SEQ ID NO: 51121 - DNA, 50 bp, synthetic construct
  source 1..50: mol_type = other DNA
tgtgttccgataggagtaccgacacatgtagagactatagtgttgataca

SEQ ID NO: 51122 - DNA, 50 bp, synthetic construct
  source 1..50: mol_type = other DNA
ataattgaaaattagatataaaattttatttatataaattatatatgtct

SEQ ID NO: 51123 - DNA, 50 bp, synthetic construct
  source 1..50: mol_type = other DNA
aaaactatcaatatgtttttcgtggagacgaatcgcaggaatattaccca

SEQ ID NO: 51124 - DNA, 50 bp, synthetic construct
  source 1..50: mol_type = other DNA
agaagtgttcatatactaataatgagcattattgtccaaactcgatgtcg

SEQ ID NO: 51125 - DNA, 50 bp, synthetic construct
  source 1..50: mol_type = other DNA
cgacattaagtttggacaataacgctcatcattttccaaacttatattaa

SEQ ID NO: 51126 - DNA, 50 bp, synthetic construct
  source 1..50: mol_type = other DNA
actgtattttagcggataatcagatttctgattatcttttcataagttgg

SEQ ID NO: 51127 - DNA, 50 bp, synthetic construct
  source 1..50: mol_type = other DNA
atgatatttttgtactaatatattatggtgtgttagtacaaaaaataaaa

SEQ ID NO: 51128 - DNA, 50 bp, synthetic construct
  source 1..50: mol_type = other DNA
tcgtggtctgcgtgtagttccttgtacaagggactacacagagtaggtat

SEQ ID NO: 51129 - DNA, 50 bp, synthetic construct
  source 1..50: mol_type = other DNA
gagaaaagtgattaaaaaactattgaagagacttcttaatcaattaattt

SEQ ID NO: 51130 - DNA, 50 bp, synthetic construct
  source 1..50: mol_type = other DNA
tgggttttattcctgcgattcgtctccacgaaaaacacattgacaaagtt

SEQ ID NO: 51131 - DNA, 50 bp, synthetic construct
  source 1..50: mol_type = other DNA
gcattacttgcgacgtagcaacgctagtatatgaacacttctttttatta

SEQ ID NO: 51132 - DNA, 50 bp, synthetic construct
  source 1..50: mol_type = other DNA
ttaaaaatatttgtactaatattatagtatattagtacaaaaattaaagc

SEQ ID NO: 51133 - DNA, 50 bp, synthetic construct
  source 1..50: mol_type = other DNA
attaaaaacccccatatttttacctaggtaggagttctctttcctttgaa

SEQ ID NO: 51134 - DNA, 50 bp, synthetic construct
  source 1..50: mol_type = other DNA
tttctttttgttccctttaattagccccaattaggtgtaaaactctgctc

SEQ ID NO: 51135 - DNA, 50 bp, synthetic construct
  source 1..50: mol_type = other DNA
atactgccttataaaacctcagcattagccatgggctaataaggcagtat

SEQ ID NO: 51136 - DNA, 50 bp, synthetic construct
  source 1..50: mol_type = other DNA
gtgttttcctaatatgaaacattcatgattgtttcttattaggaacgctg

SEQ ID NO: 51137 - DNA, 50 bp, synthetic construct
  source 1..50: mol_type = other DNA
aatatgttttcctgtcatgggcaagtcaaaaatacccatgagaaaaagat

SEQ ID NO: 51138 - DNA, 50 bp, synthetic construct
  source 1..50: mol_type = other DNA
actttgttgggacaaagaaagtaccggttgttcttttgtcccaacaaaaa

SEQ ID NO: 51139 - DNA, 50 bp, synthetic construct
  source 1..50: mol_type = other DNA
acaatatctttaactaagggaaacggggttcacttagataaagataccac

SEQ ID NO: 51140 - DNA, 50 bp, synthetic construct
  source 1..50: mol_type = other DNA
cagcaaaataacaatgtgtctagcatgttatttctctccttattttgagt

SEQ ID NO: 51141 - DNA, 50 bp, synthetic construct
  source 1..50: mol_type = other DNA
acccctccatgctttatatatccatcaccgctatcaaaggttgtgaggag

SEQ ID NO: 51142 - DNA, 50 bp, synthetic construct
  source 1..50: mol_type = other DNA
acttttcgcaaataatcacttcctttttgatagcattttttgggataaag

SEQ ID NO: 51143 - DNA, 50 bp, synthetic construct
  source 1..50: mol_type = other DNA
tctacatagttcgtctttgtagcaacaatgtgtttgaactactatgtgaa

SEQ ID NO: 51144 - DNA, 50 bp, synthetic construct
  source 1..50: mol_type = other DNA
gacaattaaaaaaacctcatcattaagtgatgcggtttttattaattagt

SEQ ID NO: 51145 - DNA, 50 bp, synthetic construct
  source 1..50: mol_type = other DNA
ataatatttttgtactaatattatatgatatattagtacaaaaaaataaa

SEQ ID NO: 51146 - DNA, 50 bp, synthetic construct
  source 1..50: mol_type = other DNA
gatatttttgtactaatatattattaagggtgtgttagtacaaaaaaata

SEQ ID NO: 51147 - DNA, 50 bp, synthetic construct
  source 1..50: mol_type = other DNA
tcatatctttaactaagggaaagcggagtttcccaaacaaaaggatatta

SEQ ID NO: 51148 - DNA, 50 bp, synthetic construct
  source 1..50: mol_type = other DNA
cattatgcccttgtcaagaatagtttaggtttctttacaaaggcataatc

SEQ ID NO: 51149 - DNA, 50 bp, synthetic construct
  source 1..50: mol_type = other DNA
ctcgtgtgtattttacactctaacaagttacaatgtcaattcaacacatt

SEQ ID NO: 51150 - DNA, 50 bp, synthetic construct
  source 1..50: mol_type = other DNA
aatcatcttgcggcagagagaaaaattttttattgatttgatagacggaa

SEQ ID NO: 51151 - DNA, 50 bp, synthetic construct
  source 1..50: mol_type = other DNA
cgatttcactctttgtatcaacgctaggataggaatacaaattattaacc

SEQ ID NO: 51152 - DNA, 50 bp, synthetic construct
  source 1..50: mol_type = other DNA
aaacacgctccgttacttgtgatacgttacacctccaaaggagcacgttt

SEQ ID NO: 51153 - DNA, 50 bp, synthetic construct
  source 1..50: mol_type = other DNA
tgttgtgcataaataaacggctctactgccccgtcaatatatgcacaaca

SEQ ID NO: 51154 - DNA, 50 bp, synthetic construct
  source 1..50: mol_type = other DNA
tatcgacaccaagtttggacaataataggaatacaaattattaacctcgt

SEQ ID NO: 51155 - DNA, 50 bp, synthetic construct
  source 1..50: mol_type = other DNA
caatattttaaaattagtgaaactccactttcccttagttaaagatatga

SEQ ID NO: 51156 - DNA, 50 bp, synthetic construct
  source 1..50: mol_type = other DNA
gatgtttacgaatttttgtgggacaagacccacaaagctccagacagcta

SEQ ID NO: 51157 - DNA, 50 bp, synthetic construct
  source 1..50: mol_type = other DNA
agtttggacaatagtgctaccgtctcgttactactatcggaacacatttt

SEQ ID NO: 51158 - DNA, 50 bp, synthetic construct
  source 1..50: mol_type = other DNA
taaatataagtttggacaatgataagcacttttgtccaaactaaaatcga

SEQ ID NO: 51159 - DNA, 50 bp, synthetic construct
  source 1..50: mol_type = other DNA
ggttgaaaatttatgttcacatagtagcactattgtccaaacttgatgtc

SEQ ID NO: 51160 - DNA, 50 bp, synthetic construct
  source 1..50: mol_type = other DNA
cgacatcgagtttggacaataatgctcatcattgtccaaacttatattta

SEQ ID NO: 51161 - DNA, 50 bp, synthetic construct
  source 1..50: mol_type = other DNA
caatatctttaactatgtgataccggggtttcacttagataaagatacca

SEQ ID NO: 51162 - DNA, 50 bp, synthetic construct
  source 1..50: mol_type = other DNA
tatgcttatcgacattaagtttggaccaaagacccacaaagctccagaca

SEQ ID NO: 51163 - DNA, 50 bp, synthetic construct
  source 1..50: mol_type = other DNA
tttggttcttacttgacacaggcaggtgaccgtgttataataagaccaag

SEQ ID NO: 51164 - DNA, 50 bp, synthetic construct
  source 1..50: mol_type = other DNA
ccatatccttaacttcgggaaaccggagtttcccatagttaaggatacca

SEQ ID NO: 51165 - DNA, 50 bp, synthetic construct
  source 1..50: mol_type = other DNA
agttgcacttttttagctatagcagaagcaaggtatataaaagtgcaact

SEQ ID NO: 51166 - DNA, 50 bp, synthetic construct
  source 1..50: mol_type = other DNA
ggtcagacttgatgtattcaaggacatgggtgaacatagcaagtttgaca

SEQ ID NO: 51167 - DNA, 50 bp, synthetic construct
  source 1..50: mol_type = other DNA
acttcttttattgttgcactttgggacaagagtgcaacattttaccaaag

SEQ ID NO: 51168 - DNA, 50 bp, synthetic construct
  source 1..50: mol_type = other DNA
ataaatagatacttttatgatcatgacaccaatgacaagtaaacatttat

SEQ ID NO: 51169 - DNA, 50 bp, synthetic construct
  source 1..50: mol_type = other DNA
tatcaatcagttcgtgaccactactacaaatggtcacacacggaaattat

SEQ ID NO: 51170 - DNA, 50 bp, synthetic construct
  source 1..50: mol_type = other DNA
agtttggacaataaacataccgtctcaacatgttcaccgttgtccaaacc

SEQ ID NO: 51171 - DNA, 50 bp, synthetic construct
  source 1..50: mol_type = other DNA
tatggctaatgctacaatgccgaatattcggttttctaagaggcctgtta

SEQ ID NO: 51172 - DNA, 50 bp, synthetic construct
  source 1..50: mol_type = other DNA
ttttcccaaagatcataacagtaaaattacttttacaatcaacacctgca

SEQ ID NO: 51173 - DNA, 50 bp, synthetic construct
  source 1..50: mol_type = other DNA
tttggacaataacgctaccgtctctactatcggaacacattttatcaacc

SEQ ID NO: 51174 - DNA, 50 bp, synthetic construct
  source 1..50: mol_type = other DNA
aatccagctatttagccattttatatattttctttatgcttatttatatt

SEQ ID NO: 51175 - DNA, 50 bp, synthetic construct
  source 1..50: mol_type = other DNA
agtttggacaataacgctaccgtctcaacttgctcatcattttccaaact

SEQ ID NO: 51176 - DNA, 50 bp, synthetic construct
  source 1..50: mol_type = other DNA
tttttgcctaacatagcactttcaagtgtaaatgctcctttaggcaaaac

SEQ ID NO: 51177 - DNA, 50 bp, synthetic construct
  source 1..50: mol_type = other DNA
cgtctttgtagcaacacacaagtctcgttactactatcggaacacatttt

SEQ ID NO: 51178 - DNA, 50 bp, synthetic construct
  source 1..50: mol_type = other DNA
aaatttatgttcacatagtagttcaatacgccacatgtggagactgtagc

SEQ ID NO: 51179 - DNA, 50 bp, synthetic construct
  source 1..50: mol_type = other DNA
cgtagcaacgctacagtctccacatgtgtttgaactactatgtgaacata

SEQ ID NO: 51180 - DNA, 50 bp, synthetic construct
  source 1..50: mol_type = other DNA
atctttaattaagggagaacggacaactggagtttcccatagttaaagat

SEQ ID NO: 51181 - DNA, 50 bp, synthetic construct
  source 1..50: mol_type = other DNA
tacaatgatgtgtgattgaaaataccttatctaaatcacacatattatcg

SEQ ID NO: 51182 - DNA, 50 bp, synthetic construct
  source 1..50: mol_type = other DNA
gtctggctttttgtgggaaagcagtacctctttcccacaaaactttcctt

SEQ ID NO: 51183 - DNA, 50 bp, synthetic construct
  source 1..50: mol_type = other DNA
tatcgtcctactaaagtatagccctcgggaacgagtttgtcaagatgatt

SEQ ID NO: 51184 - DNA, 50 bp, synthetic construct
  source 1..50: mol_type = other DNA
atcgctgctttcatggtgctgaatgtatataagaccatgcgtggatcggt

SEQ ID NO: 51185 - DNA, 50 bp, synthetic construct
  source 1..50: mol_type = other DNA
aattgtactaaaatactttaaccagatggtgaaggactttttgtacaaca

SEQ ID NO: 51186 - DNA, 50 bp, synthetic construct
  source 1..50: mol_type = other DNA
tattttatttatttggactaactaataagttagtccaaataattatataa

SEQ ID NO: 51187 - DNA, 50 bp, synthetic construct
  source 1..50: mol_type = other DNA
tataaataataataaaacggtctccggagcgtggattagcaaaaactacg

SEQ ID NO: 51188 - DNA, 50 bp, synthetic construct
  source 1..50: mol_type = other DNA
aatacaggatttcaagccttactttccacatgtgtttgaactactatatg

SEQ ID NO: 51189 - DNA, 50 bp, synthetic construct
  source 1..50: mol_type = other DNA
cgacggattccttgcgaccgaccccgggtcacttcctcccagatccgccc

SEQ ID NO: 51190 - DNA, 50 bp, synthetic construct
  source 1..50: mol_type = other DNA
agtttggacaataatgctaccgtctcgacttgctcatcattgtccaaaca

SEQ ID NO: 51191 - DNA, 50 bp, synthetic construct
  source 1..50: mol_type = other DNA
caatatctttaactaagggaaacgggagtttcccaaagttaaagatacca

SEQ ID NO: 51192 - DNA, 50 bp, synthetic construct
  source 1..50: mol_type = other DNA
taatcagaaatttagtaagtttttaaaaaaacacaataaaaatctgatta

SEQ ID NO: 51193 - DNA, 50 bp, synthetic construct
  source 1..50: mol_type = other DNA
gttctttacacttaagattatgcactagttccccatgaagcgttttgtca

SEQ ID NO: 51194 - DNA, 50 bp, synthetic construct
  source 1..50: mol_type = other DNA
catttttgaggtaaatctacttcaattgtagtaaaaaatcaacggtgctg

SEQ ID NO: 51195 - DNA, 50 bp, synthetic construct
  source 1..50: mol_type = other DNA
cgccctctgcaaaaaaggttacgttaacgatactttttgaaacacagtaa

SEQ ID NO: 51196 - DNA, 50 bp, synthetic construct
  source 1..50: mol_type = other DNA
acgctggtctgcaagcagacaatcactacctactgattgcagcccaccgt

SEQ ID NO: 51197 - DNA, 50 bp, synthetic construct
  source 1..50: mol_type = other DNA
aagaagtaaatatagtaagtgacagtgggtatatagaataggtactaatt

SEQ ID NO: 51198 - DNA, 50 bp, synthetic construct
  source 1..50: mol_type = other DNA
aattctttaattgaatcataaaaactttattataatggaataaaagaagg

SEQ ID NO: 51199 - DNA, 50 bp, synthetic construct
  source 1..50: mol_type = other DNA
tatttcatttgtatatataataagaaccccacatatatataaataaaaat

SEQ ID NO: 51200 - DNA, 50 bp, synthetic construct
  source 1..50: mol_type = other DNA
ccttgtatcaaaatgagtcactaaactaggacgcccattttgatacattg

SEQ ID NO: 51201 - DNA, 50 bp, synthetic construct
  source 1..50: mol_type = other DNA
caatgtatcaaaatgggcgtcctagtttagtgactcattttgatacaagg

SEQ ID NO: 51202 - DNA, 50 bp, synthetic construct
  source 1..50: mol_type = other DNA
gatggagtttgcctgtaaataacaggtatgagtttcagtgagattgcccg

SEQ ID NO: 51203 - DNA, 50 bp, synthetic construct
  source 1..50: mol_type = other DNA
tatttttctgtacgttccaggaccgttgatcaattacacatttccaaaca

SEQ ID NO: 51204 - DNA, 50 bp, synthetic construct
  source 1..50: mol_type = other DNA
aaatattagtaaaaacctcacttaaataaatgaggttttggatagaattg

SEQ ID NO: 51205 - DNA, 50 bp, synthetic construct
  source 1..50: mol_type = other DNA
tattgtttaatccagccaccatttcgaagtggtggccgcaccaaacaacc

SEQ ID NO: 51206 - DNA, 50 bp, synthetic construct
  source 1..50: mol_type = other DNA
cgattgtggaaaagaggcggctgcaccgcgccgtccccggaacacaaaca

SEQ ID NO: 51207 - DNA, 50 bp, synthetic construct
  source 1..50: mol_type = other DNA
tgtcgtcatcgaccccatccgcaatgtgaacgcgccgctcgatcccgacg

SEQ ID NO: 51208 - DNA, 50 bp, synthetic construct
  source 1..50: mol_type = other DNA
tgattaagaagtcttttagagcatacgaaaagtcaaggactttttcatca

SEQ ID NO: 51209 - DNA, 50 bp, synthetic construct
  source 1..50: mol_type = other DNA
tgtcagaagtgtcatatatgacgaagccgcccgcaatcccacggacgaca

SEQ ID NO: 51210 - DNA, 50 bp, synthetic construct
  source 1..50: mol_type = other DNA
gattcgttcttcataggcaacgaatatcgcgatattatggagaaataact

SEQ ID NO: 51211 - DNA, 50 bp, synthetic construct
  source 1..50: mol_type = other DNA
ttcttctgcatttatgcatgatacagttttcaggcggcaagtacacagaa

SEQ ID NO: 51212 - DNA, 50 bp, synthetic construct
  source 1..50: mol_type = other DNA
caatgatgctgcagataggctctgtacagagatggtctgaatcttattat

SEQ ID NO: 51213 - DNA, 50 bp, synthetic construct
  source 1..50: mol_type = other DNA
atcatcacaccatatcggaaacgcccaaattgaaagcgaggtgagctgat

SEQ ID NO: 51214 - DNA, 50 bp, synthetic construct
  source 1..50: mol_type = other DNA
tgacctcctttgtctcgtttcaaatctttgatgagaatatccccacgcca

SEQ ID NO: 51215 - DNA, 50 bp, synthetic construct
  source 1..50: mol_type = other DNA
gtgtggttgccgatccggtctgtgaccagaggggtttcagtgaacctgtt

SEQ ID NO: 51216 - DNA, 50 bp, synthetic construct
  source 1..50: mol_type = other DNA
tacggaaaggagctgtaagcagatgccaggtattccagttatcttccggg

SEQ ID NO: 51217 - DNA, 50 bp, synthetic construct
  source 1..50: mol_type = other DNA
attaaatgacggcaggagccgaaagaccttctctcggttcggcaggaaat

SEQ ID NO: 51218 - DNA, 50 bp, synthetic construct
  source 1..50: mol_type = other DNA
aaaagtcacctaagccacctttcaagtcgggtaatgctttacggaagttt

SEQ ID NO: 51219 - DNA, 50 bp, synthetic construct
  source 1..50: mol_type = other DNA
tagccaaaatgatttaaaagtgtttgaacactttcaaatcaattcactag

SEQ ID NO: 51220 - DNA, 50 bp, synthetic construct
  source 1..50: mol_type = other DNA
aaacgtgctcctttggaggtgtaacgtatcacaagtaacggagcgtgttt

SEQ ID NO: 51221 - DNA, 50 bp, synthetic construct
  source 1..50: mol_type = other DNA
aaggaaagttttgtgggaaagaggtactgctttcccacaaaaagccagac

SEQ ID NO: 51222 - DNA, 50 bp, synthetic construct
  source 1..50: mol_type = other DNA
tcttttttgaattcatcacttgacattcatggtgacgagttcagttgcct

SEQ ID NO: 51223 - DNA, 50 bp, synthetic construct
  source 1..50: mol_type = other DNA
atgccgaatagctacaatacaatgaccattgaataaagtctattcggttt

SEQ ID NO: 51224 - DNA, 50 bp, synthetic construct
  source 1..50: mol_type = other DNA
ttaatttttgtactaatacactactaataatatattagtacaaaaatatc

SEQ ID NO: 51225 - DNA, 50 bp, synthetic construct
  source 1..50: mol_type = other DNA
ccctgaatctccagacaaccaatatcacttgttcagcaaccagatcaaaa

SEQ ID NO: 51226 - DNA, 50 bp, synthetic construct
  source 1..50: mol_type = other DNA
tagtgtatttaaacgtgtctaataaaaatcatcaaggtctaaatacacta

SEQ ID NO: 51227 - DNA, 50 bp, synthetic construct
  source 1..50: mol_type = other DNA
tgtgtttacatagtagctccgacacatgtggagactattgtgttgataca

SEQ ID NO: 51228 - DNA, 50 bp, synthetic construct
  source 1..50: mol_type = other DNA
gaataccctgctctttcggtcacttaaaaaaaggagagctttcgctctcc

SEQ ID NO: 51229 - DNA, 50 bp, synthetic construct
  source 1..50: mol_type = other DNA
gtgctccgttacttatggtacggttctccgttacacctccaaaggatgtt

SEQ ID NO: 51230 - DNA, 50 bp, synthetic construct
  source 1..50: mol_type = other DNA
aatgtccgcaaaatccgttctacatcagtcggtcattttttgcggacagt

SEQ ID NO: 51231 - DNA, 50 bp, synthetic construct
  source 1..50: mol_type = other DNA
aaaactttgcgactacttgtgatacgtcaacaatcaactcgcaaaattta

SEQ ID NO: 51232 - DNA, 50 bp, synthetic construct
  source 1..50: mol_type = other DNA
gaaagcagtactaccgtctcaacgtggcttgagaggacagaatgaatgtc

SEQ ID NO: 51233 - DNA, 50 bp, synthetic construct
  source 1..50: mol_type = other DNA
tatcgacatcaagtttggacaataactacagtctcaacggtattaccaaa

SEQ ID NO: 51234 - DNA, 50 bp, synthetic construct
  source 1..50: mol_type = other DNA
tctcttacacttaagattatgcactcaagtgcttttttgagttattgacg

SEQ ID NO: 51235 - DNA, 50 bp, synthetic construct
  source 1..50: mol_type = other DNA
gagattacaatcgtggataatattcccctcgtctccaccattgaaatcca

SEQ ID NO: 51236 - DNA, 50 bp, synthetic construct
  source 1..50: mol_type = other DNA
tccagatgaaccagctccacaccccggcgcctggtcttgggtgatctggg

SEQ ID NO: 51237 - DNA, 50 bp, synthetic construct
  source 1..50: mol_type = other DNA
taatacttttaagttaatcaagatacttcttacttaacttaaaagtataa

SEQ ID NO: 51238 - DNA, 50 bp, synthetic construct
  source 1..50: mol_type = other DNA
cgcgggtgtacagggcgtgccgggcgtccggctcggtctgcggggcgaag

SEQ ID NO: 51239 - DNA, 50 bp, synthetic construct
  source 1..50: mol_type = other DNA
ccggccccttccacgtcgcgctgcgcgcttcttaggctggtcattgaggg

SEQ ID NO: 51240 - DNA, 50 bp, synthetic construct
  source 1..50: mol_type = other DNA
aagcatccgaccctccctcggcttttgtcttaggtcatcgttcgatgccg

SEQ ID NO: 51241 - DNA, 50 bp, synthetic construct
  source 1..50: mol_type = other DNA
tccccgccttcccgtcggcgctatgcaattcgcgcggagaaaggcgaggc

SEQ ID NO: 51242 - DNA, 50 bp, synthetic construct
  source 1..50: mol_type = other DNA
gatgtacaacattactctttattttcaattacagaataatgttgcatata

SEQ ID NO: 51243 - DNA, 50 bp, synthetic construct
  source 1..50: mol_type = other DNA
ggcgtaccaatatcaggcgtttgaccggaaattggctaaattggtagtgc

SEQ ID NO: 51244 - DNA, 50 bp, synthetic construct
  source 1..50: mol_type = other DNA
gtaaaattgactttagtattttaataataaaatactaataatatcgttta

SEQ ID NO: 51245 - DNA, 50 bp, synthetic construct
  source 1..50: mol_type = other DNA
accttttattgatataaattaatatccattatttgtgataaggttctccg

SEQ ID NO: 51246 - DNA, 50 bp, synthetic construct
  source 1..50: mol_type = other DNA
ataaaataaataaacatatttactatagtaaacttgtttatttttaataa

SEQ ID NO: 51247 - DNA, 50 bp, synthetic construct
  source 1..50: mol_type = other DNA
gtacatttgctctcagtccaatggatagtgataacttgcattttatggta

SEQ ID NO: 51248 - DNA, 50 bp, synthetic construct
  source 1..50: mol_type = other DNA
ctttcccccattcagtcgctatgcttgcattttaatgtaagtctcaaaaa

SEQ ID NO: 51249 - DNA, 50 bp, synthetic construct
  source 1..50: mol_type = other DNA
aaatagttatgcctttaagaaaacatgacataactctagaatccgccctt

SEQ ID NO: 51250 - DNA, 50 bp, synthetic construct
  source 1..50: mol_type = other DNA
aagcgaacatctaaagaaaaccgaattcggcattgtagcattagccataa

SEQ ID NO: 51251 - DNA, 50 bp, synthetic construct
  source 1..50: mol_type = other DNA
aatcagagcacatttggaaactttgcaatgttatcagatgtgcttgactt

SEQ ID NO: 51252 - DNA, 50 bp, synthetic construct
  source 1..50: mol_type = other DNA
atttataaggcttttgacggatatctgaatactccaaaaaccttatatgg

SEQ ID NO: 51253 - DNA, 50 bp, synthetic construct
  source 1..50: mol_type = other DNA
tcaaagagatttttacccaatatctgctgttattaagcaacttcgattgg

SEQ ID NO: 51254 - DNA, 50 bp, synthetic construct
  source 1..50: mol_type = other DNA
aggaaatataatatagtaatttatcacataatcgagagttaatatctcca

SEQ ID NO: 51255 - DNA, 50 bp, synthetic construct
  source 1..50: mol_type = other DNA
ggcataaaagttaaaaccttgttcttgaatatggtttagtcttttatgcg

SEQ ID NO: 51256 - DNA, 50 bp, synthetic construct
  source 1..50: mol_type = other DNA
tgttgtactcaaactatattccttacgacaggtatcgtttgagtataaca

SEQ ID NO: 51257 - DNA, 50 bp, synthetic construct
  source 1..50: mol_type = other DNA
ttcttttttatggtcattacttagtacttaatgtgatgcactagcaattc

SEQ ID NO: 51258 - DNA, 50 bp, synthetic construct
  source 1..50: mol_type = other DNA
atgtttttgttttcattgtagtaataggataacaataaaatgaaaaaatg

SEQ ID NO: 51259 - DNA, 50 bp, synthetic construct
  source 1..50: mol_type = other DNA
cggcacattccccggccccgcgtataaactgaggtggtagcactgtagcc

SEQ ID NO: 51260 - DNA, 50 bp, synthetic construct
  source 1..50: mol_type = other DNA
cggtgcaattatattccttcattctcaatcgtgggtatttaattgcgcag

SEQ ID NO: 51261 - DNA, 50 bp, synthetic construct
  source 1..50: mol_type = other DNA
gatgctccggcacatcgcaaatgtatatattatcagacaactcggacagg

SEQ ID NO: 51262 - DNA, 50 bp, synthetic construct
  source 1..50: mol_type = other DNA
agtataggtatagtatccctcgggtgcccgagagatatcggaagtatacc

SEQ ID NO: 51263 - DNA, 50 bp, synthetic construct
  source 1..50: mol_type = other DNA
taggggtcttgtgaaaacaacatgctaatagtattctcaacggacccgat

SEQ ID NO: 51264 - DNA, 50 bp, synthetic construct
  source 1..50: mol_type = other DNA
gatgcgccggcacatcgcaaatgtatatattatcagacaactcggacagg

SEQ ID NO: 51265 - DNA, 50 bp, synthetic construct
  source 1..50: mol_type = other DNA
caagcagtcaaaaagtatcttttttaaaaatccataaaaaatatatgtga

SEQ ID NO: 51266 - DNA, 50 bp, synthetic construct
  source 1..50: mol_type = other DNA
ttttaaacgaattatagcaaactttaaaaacgcattaaaagatacaaaat

SEQ ID NO: 51267 - DNA, 50 bp, synthetic construct
  source 1..50: mol_type = other DNA
tttggtatctcgtttcttcttcttccagagagagaaatcgaggtactaaa

SEQ ID NO: 51268 - DNA, 50 bp, synthetic construct
  source 1..50: mol_type = other DNA
cattttttcattaatttaagttggcttactatagcacggttgaaaaagtg

SEQ ID NO: 51269 - DNA, 50 bp, synthetic construct
  source 1..50: mol_type = other DNA
taacaaggttattatttttgtaaaattttgacaaaaaaatatttcgatca

SEQ ID NO: 51270 - DNA, 50 bp, synthetic construct
  source 1..50: mol_type = other DNA
cactagttattagtactattcacagttgtgattgtcattaataactagtt

SEQ ID NO: 51271 - DNA, 50 bp, synthetic construct
  source 1..50: mol_type = other DNA
atattacgttttaaggggaataatgcaatattaacctttttaataaatgc

SEQ ID NO: 51272 - DNA, 50 bp, synthetic construct
  source 1..50: mol_type = other DNA
tctttcttcaataataatttcctcatggagaaatgcttgctggacaatac

SEQ ID NO: 51273 - DNA, 50 bp, synthetic construct
  source 1..50: mol_type = other DNA
accataaaatgtaagttatcactatacagtgcataactacaagaacggat

SEQ ID NO: 51274 - DNA, 50 bp, synthetic construct
  source 1..50: mol_type = other DNA
atcaatctagggaatggtatcacagttgtgcaaccattccctaaaagcga

SEQ ID NO: 51275 - DNA, 50 bp, synthetic construct
  source 1..50: mol_type = other DNA
aattttatgggtcttttaggtactaatagacctacgttatttttaggagt

SEQ ID NO: 51276 - DNA, 50 bp, synthetic construct
  source 1..50: mol_type = other DNA
taataccgcttttttctttgtcatatactcataatggtaaagcgaatcaa

SEQ ID NO: 51277 - DNA, 50 bp, synthetic construct
  source 1..50: mol_type = other DNA
atgtcgtcaatcatacagttgactaaagacaactgcatgttatactacat

SEQ ID NO: 51278 - DNA, 50 bp, synthetic construct
  source 1..50: mol_type = other DNA
tttatctattcctattggatcttgaaaaggattaaataattatatttaat

SEQ ID NO: 51279 - DNA, 50 bp, synthetic construct
  source 1..50: mol_type = other DNA
tatgaaaggtgaggttatggatattattatgaatatttgcacatagccta

SEQ ID NO: 51280 - DNA, 50 bp, synthetic construct
  source 1..50: mol_type = other DNA
attaaatataattatttaatccttttcaagatccaataggaatagataaa

SEQ ID NO: 51281 - DNA, 50 bp, synthetic construct
  source 1..50: mol_type = other DNA
ttatactaattttataaataatagttctttatctatttaaattattataa

SEQ ID NO: 51282 - DNA, 50 bp, synthetic construct
  source 1..50: mol_type = other DNA
taattgaataaaagatttagagggataaaaatagctctttttctcatttg

SEQ ID NO: 51283 - DNA, 50 bp, synthetic construct
  source 1..50: mol_type = other DNA
atcctcatggtgtatttagaccttgacacgtttaaatacactacctaaag

SEQ ID NO: 51284 - DNA, 50 bp, synthetic construct
  source 1..50: mol_type = other DNA
tcgcaagcgcctcgaatgcccgcgtcagcgacacgacggtgcgcgacctc

SEQ ID NO: 51285 - DNA, 50 bp, synthetic construct
  source 1..50: mol_type = other DNA
ccctaatctacctcatagtgtatttaaatacactacctaaagcgatacaa

SEQ ID NO: 51286 - DNA, 50 bp, synthetic construct
  source 1..50: mol_type = other DNA
tccctaaaactcatactatgtacaattattcactgtttaaaattcatatt

SEQ ID NO: 51287 - DNA, 50 bp, synthetic construct
  source 1..50: mol_type = other DNA
aagattggatttatatcattagggtgccctaataatcaagaaataaatta

SEQ ID NO: 51288 - DNA, 50 bp, synthetic construct
  source 1..50: mol_type = other DNA
aatttgtgatctttcccgaagaaagtttccttcgggagagttgggtgatt

SEQ ID NO: 51289 - DNA, 50 bp, synthetic construct
  source 1..50: mol_type = other DNA
tacgggtattatacgcctgacttgatcaacacgtccatgatttacctgtg

SEQ ID NO: 51290 - DNA, 50 bp, synthetic construct
  source 1..50: mol_type = other DNA
gccgtctgttcaaatggtagcgggggctggctaccatcggtacagacccc

SEQ ID NO: 51291 - DNA, 50 bp, synthetic construct
  source 1..50: mol_type = other DNA
ggactctacaagattttggaacctatacgttccacgcaccggttgaccaa

SEQ ID NO: 51292 - DNA, 50 bp, synthetic construct
  source 1..50: mol_type = other DNA
atcctcatagtgcatttagaccttgacacgtttaaatacaccatcttaag

SEQ ID NO: 51293 - DNA, 50 bp, synthetic construct
  source 1..50: mol_type = other DNA
ttgggcaagtctgtttagttaagcgagtataataaaatagaaaaacccaa

SEQ ID NO: 51294 - DNA, 50 bp, synthetic construct
  source 1..50: mol_type = other DNA
cagagcacatttggaaactttgcgtcagcaatgttatcagatgtgcttga

SEQ ID NO: 51295 - DNA, 50 bp, synthetic construct
  source 1..50: mol_type = other DNA
ttccaaaacaaaaagcccctaccgcgttttaggcgctctcctgaatgcgc

SEQ ID NO: 51296 - DNA, 50 bp, synthetic construct
  source 1..50: mol_type = other DNA
ccatgcacatttgacaacttcgctgaaacaatatttgcaaatgtgctatg

SEQ ID NO: 51297 - DNA, 50 bp, synthetic construct
  source 1..50: mol_type = other DNA
gatagaacatattacccatacctgcacaggtatgtgtaatatgaaatgag

SEQ ID NO: 51298 - DNA, 50 bp, synthetic construct
  source 1..50: mol_type = other DNA
ttgggtttttccgttttattatactcacttaactaaatagacttgcccaa

SEQ ID NO: 51299 - DNA, 50 bp, synthetic construct
  source 1..50: mol_type = other DNA
gttgatgggtacatgatattaggaaacccgaacgtagtcaacccccaata

SEQ ID NO: 51300 - DNA, 50 bp, synthetic construct
  source 1..50: mol_type = other DNA
aaaaagagtagcaagtaagccactctagtgtatcgtttttaactatttga

SEQ ID NO: 51301 - DNA, 50 bp, synthetic construct
  source 1..50: mol_type = other DNA
cagctacaagcagagcagctaaagaaatagttctggcaagcttgtttgcc

SEQ ID NO: 51302 - DNA, 50 bp, synthetic construct
  source 1..50: mol_type = other DNA
aatattggatttttttaattttaaaggtaaaaatgaaaattaacactaac

SEQ ID NO: 51303 - DNA, 50 bp, synthetic construct
  source 1..50: mol_type = other DNA
tgtgtataattagcaaaaaatgaactatcttttttgagactttatctgta

SEQ ID NO: 51304 - DNA, 50 bp, synthetic construct
  source 1..50: mol_type = other DNA
ttttaagagccagttaagttggaaactgagtcctttggattttcttaaag

SEQ ID NO: 51305 - DNA, 50 bp, synthetic construct
  source 1..50: mol_type = other DNA
ctgcggcgagtgccagcagtggggcaccggagtatttgaacttcacgcca

SEQ ID NO: 51306 - DNA, 50 bp, synthetic construct
  source 1..50: mol_type = other DNA
ctccatgcgcgtctccttgtatcaagtggtaatgggagaattcttggaag

SEQ ID NO: 51307 - DNA, 50 bp, synthetic construct
  source 1..50: mol_type = other DNA
gtgggatgatgctcgaatccatcttgacctacatgctcgcaagacgacac

SEQ ID NO: 51308 - DNA, 50 bp, synthetic construct
  source 1..50: mol_type = other DNA
gacctacccaaaaaattacaggttaatacctgtaagattcgaccttgcag

SEQ ID NO: 51309 - DNA, 50 bp, synthetic construct
  source 1..50: mol_type = other DNA
ccgttcagcgccactttgtacgtccggacttccaggcaggcgtaataact

SEQ ID NO: 51310 - DNA, 50 bp, synthetic construct
  source 1..50: mol_type = other DNA
gagtttttcctttgtatcaacacaataatatgaatacaatttttcagcct

SEQ ID NO: 51311 - DNA, 50 bp, synthetic construct
  source 1..50: mol_type = other DNA
attctgataattcgtctccaataattggatttagactgagtaatcccttt

SEQ ID NO: 51312 - DNA, 50 bp, synthetic construct
  source 1..50: mol_type = other DNA
ttatgaagttttcctaatatcattcaaatgatgatattttaaagaataaa

SEQ ID NO: 51313 - DNA, 50 bp, synthetic construct
  source 1..50: mol_type = other DNA
cgctttttacatatgaaacaataatgatattgttacttaatagcaaagga

SEQ ID NO: 51314 - DNA, 50 bp, synthetic construct
  source 1..50: mol_type = other DNA
ttactatatacttttatgtgactatttagacacacaaaaaaagcccccta

SEQ ID NO: 51315 - DNA, 50 bp, synthetic construct
  source 1..50: mol_type = other DNA
cttaacataaaaactttcctgttaatttacaggaataaaattatgccttc

SEQ ID NO: 51316 - DNA, 50 bp, synthetic construct
  source 1..50: mol_type = other DNA
gtttaaaatgtcatagtgttggtaattaccaacactattacagattatga

SEQ ID NO: 51317 - DNA, 50 bp, synthetic construct
  source 1..50: mol_type = other DNA
tgcgatgctatcacccactcttcgttagtattgcatctgctagcagagga

SEQ ID NO: 51318 - DNA, 50 bp, synthetic construct
  source 1..50: mol_type = other DNA
agtttctcactttacaagattaactgataaacttcttgaactagataact

SEQ ID NO: 51319 - DNA, 50 bp, synthetic construct
  source 1..50: mol_type = other DNA
cacttttataccaatatgcacacctaggtgtgcacattgtgctaatttta

SEQ ID NO: 51320 - DNA, 50 bp, synthetic construct
  source 1..50: mol_type = other DNA
aagaagttattacacaggaaatagtactgtaccgagtataataaactcta

SEQ ID NO: 51321 - DNA, 50 bp, synthetic construct
  source 1..50: mol_type = other DNA
tagtgtagttcatagggatttgcaattgcaaatatataagaaaaagtgta

SEQ ID NO: 51322 - DNA, 50 bp, synthetic construct
  source 1..50: mol_type = other DNA
ccatgagcgttaaggcaagaatactggtactcttacatagctaaacacgc

SEQ ID NO: 51323 - DNA, 50 bp, synthetic construct
  source 1..50: mol_type = other DNA
ctgactcaatggaattcaaatacttcattacgctttcaggatttaggcat

SEQ ID NO: 51324 - DNA, 50 bp, synthetic construct
  source 1..50: mol_type = other DNA
ttttagatggcgtatttaaacgtgtcaaggtctaaatacactatgaggat

SEQ ID NO: 51325 - DNA, 50 bp, synthetic construct
  source 1..50: mol_type = other DNA
gtcgctggttgacttgggttaactggagggttaccatgtcgaccattact

SEQ ID NO: 51326 - DNA, 50 bp, synthetic construct
  source 1..50: mol_type = other DNA
tgttttttagtttattaattttggcaacaaaataattataccaaaaagag

SEQ ID NO: 51327 - DNA, 50 bp, synthetic construct
  source 1..50: mol_type = other DNA
ttttcttaattacaattttattgatatatagtaaggaagaaaggagaatg

SEQ ID NO: 51328 - DNA, 50 bp, synthetic construct
  source 1..50: mol_type = other DNA
tagctatggccttttttgtttttatgccattataaaaacggccttcaacg

SEQ ID NO: 51329 - DNA, 50 bp, synthetic construct
  source 1..50: mol_type = other DNA
tcactttctcctttcataatattgaaaaatattctgataatgaaaagttt

SEQ ID NO: 51330 - DNA, 50 bp, synthetic construct
  source 1..50: mol_type = other DNA
ctccatcttgatttgcatactaatcaataagtatgcaagcctgaaacact

SEQ ID NO: 51331 - DNA, 50 bp, synthetic construct
  source 1..50: mol_type = other DNA
ttttagtaatagggggttgacctcttattatacacccatcgaaacacggg

SEQ ID NO: 51332 - DNA, 50 bp, synthetic construct
  source 1..50: mol_type = other DNA
ttgaagccgcttaatcctccgctacaggatttaggcataagcggcttctc

SEQ ID NO: 51333 - DNA, 50 bp, synthetic construct
  source 1..50: mol_type = other DNA
ttttcattgcatttttatcacttttaaaagtgataaattttcaatactat

SEQ ID NO: 51334 - DNA, 50 bp, synthetic construct
  source 1..50: mol_type = other DNA
ctattccaataataaaattagggtaattcagttggaaggtgattgctttt

SEQ ID NO: 51335 - DNA, 50 bp, synthetic construct
  source 1..50: mol_type = other DNA
attatcaattggaaaatataaataattattgattttttccatctcataca

SEQ ID NO: 51336 - DNA, 50 bp, synthetic construct
  source 1..50: mol_type = other DNA
tcgactaactggcgcgcgttgtctgtaccgaaccttataaagacaaacga

SEQ ID NO: 51337 - DNA, 50 bp, synthetic construct
  source 1..50: mol_type = other DNA
aatatgtagtaacaggactaaccattaatttaatctttttactacacgaa

SEQ ID NO: 51338 - DNA, 50 bp, synthetic construct
  source 1..50: mol_type = other DNA
tcgaggagttagtatggaaacattagtagattatcgacctaaagacttga

SEQ ID NO: 51339 - DNA, 50 bp, synthetic construct
  source 1..50: mol_type = other DNA
aggtagtagagtaattctatgaaatttttcatctcagttctagaatagcc

SEQ ID NO: 51340 - DNA, 50 bp, synthetic construct
  source 1..50: mol_type = other DNA
ctgtacgttcaaggaccgtaacagacgagctattatggttaattacacat

SEQ ID NO: 51341 - DNA, 50 bp, synthetic construct
  source 1..50: mol_type = other DNA
tattgtgggtacatgatattagggaatccgaacgcagtcaacccccaata

SEQ ID NO: 51342 - DNA, 50 bp, synthetic construct
  source 1..50: mol_type = other DNA
acctgaagtatatattaccactcaaatgattattaatatatacaagctcg

SEQ ID NO: 51343 - DNA, 50 bp, synthetic construct
  source 1..50: mol_type = other DNA
tgaaaaggttgtgtattaaagcgtttacatagtattacacaaccatttta

SEQ ID NO: 51344 - DNA, 50 bp, synthetic construct
  source 1..50: mol_type = other DNA
taacattgtacattactgggatggatccattggaccgagcctaaaagttc

SEQ ID NO: 51345 - DNA, 50 bp, synthetic construct
  source 1..50: mol_type = other DNA
gtgtgagaatatcatctgccgctctcgaatggtaggggtaaatctcacac

SEQ ID NO: 51346 - DNA, 50 bp, synthetic construct
  source 1..50: mol_type = other DNA
actaagccaaaccggcctgtaggtaaagctactaagtgatttgcggcagt

SEQ ID NO: 51347 - DNA, 50 bp, synthetic construct
  source 1..50: mol_type = other DNA
attcaatacccaaaatgatgtgtttaaatacatcatgagaacgtacctgt

SEQ ID NO: 51348 - DNA, 50 bp, synthetic construct
  source 1..50: mol_type = other DNA
tttagttcctcgttttctctcgttggaagaagaagaaacgagaaactaaa

SEQ ID NO: 51349 - DNA, 50 bp, synthetic construct
  source 1..50: mol_type = other DNA
tttaagctgagtatcttaatgtgatattgtctctaaatactgattataaa

SEQ ID NO: 51350 - DNA, 50 bp, synthetic construct
  source 1..50: mol_type = other DNA
cattataatactaatgcaattataaatatggagggagtagttttgctgaa

SEQ ID NO: 51351 - DNA, 50 bp, synthetic construct
  source 1..50: mol_type = other DNA
atttttttacttggtgcaactgccattacagttattccagccaagaaaat

SEQ ID NO: 51352 - DNA, 50 bp, synthetic construct
  source 1..50: mol_type = other DNA
aagcagttgaacagattgcttatgatctcaagagaaatgtttgaagaggt

SEQ ID NO: 51353 - DNA, 50 bp, synthetic construct
  source 1..50: mol_type = other DNA
aggataccacctacatatgatgtaagcctgtcatgagtaggtatgacaat

SEQ ID NO: 51354 - DNA, 50 bp, synthetic construct
  source 1..50: mol_type = other DNA
atttaaaagtcattattttatctcctattataacacagaaacaccaaaaa

SEQ ID NO: 51355 - DNA, 50 bp, synthetic construct
  source 1..50: mol_type = other DNA
tctgaattgttggcgacgctctcttgagagtttatcaccatgagacacgt

SEQ ID NO: 51356 - DNA, 50 bp, synthetic construct
  source 1..50: mol_type = other DNA
gaaaatctataagttttagtcataaaatttactaagtaatatggagggag

SEQ ID NO: 51357 - DNA, 50 bp, synthetic construct
  source 1..50: mol_type = other DNA
cgcgtataggtatggtatccctcgggatgacgatgccctcggccatggcg

SEQ ID NO: 51358 - DNA, 50 bp, synthetic construct
  source 1..50: mol_type = other DNA
acgaaaacaacaaaataatttgaaagttcaattgcattttttatgttctc

SEQ ID NO: 51359 - DNA, 50 bp, synthetic construct
  source 1..50: mol_type = other DNA
atgttgctggtgtttgaaggaacaacctttaaaaccgacaaaggaacccg

SEQ ID NO: 51360 - DNA, 50 bp, synthetic construct
  source 1..50: mol_type = other DNA
ctacacatggtttggttgatagatatcgcgtatgaccaaactttgagtca

SEQ ID NO: 51361 - DNA, 50 bp, synthetic construct
  source 1..50: mol_type = other DNA
acgagtgtaggcatatccaacctgctcaggtaagatatgtctacacctta

SEQ ID NO: 51362 - DNA, 50 bp, synthetic construct
  source 1..50: mol_type = other DNA
ttcactctttgtatcaacgctatgcataggataggaacacaaattattaa

SEQ ID NO: 51363 - DNA, 50 bp, synthetic construct
  source 1..50: mol_type = other DNA
tgatggggattataacataaatacttgtacgcttgtcaatatccccaccc

SEQ ID NO: 51364 - DNA, 50 bp, synthetic construct
  source 1..50: mol_type = other DNA
gatgtacaacattgctctttgttttcaaatacagaataatgttgcatata

SEQ ID NO: 51365 - DNA, 50 bp, synthetic construct
  source 1..50: mol_type = other DNA
ttttgtaagattcaaaagttcatcaaaaaggacttgcgaatcttacaaat

SEQ ID NO: 51366 - DNA, 50 bp, synthetic construct
  source 1..50: mol_type = other DNA
ttgacgttatctttttatgtattcattaaattataaaaatattaacgttc

SEQ ID NO: 51367 - DNA, 50 bp, synthetic construct
  source 1..50: mol_type = other DNA
cagtctagccctgaaaaatgccccgcatcgcagtttcaacaggatcgatt

SEQ ID NO: 51368 - DNA, 50 bp, synthetic construct
  source 1..50: mol_type = other DNA
ttaatcctcgccggatattcgcgggatgtaaagcttcttgagaggatgaa

SEQ ID NO: 51369 - DNA, 50 bp, synthetic construct
  source 1..50: mol_type = other DNA
ttgtttagtaatgatcaccatgcttagatatggtataatgtcgtactgaa

SEQ ID NO: 51370 - DNA, 50 bp, synthetic construct
  source 1..50: mol_type = other DNA
gtcggtgtgaatgttcccattgattatactatgggaacattttgatttaa

SEQ ID NO: 51371 - DNA, 50 bp, synthetic construct
  source 1..50: mol_type = other DNA
atgttgtaataagcatcacacactcaagtgtgttatgcttatacaaacaa

SEQ ID NO: 51372 - DNA, 50 bp, synthetic construct
  source 1..50: mol_type = other DNA
ttttagatggtgtatttaaacgtgtcaaggtctaaatacactatagaaca

SEQ ID NO: 51373 - DNA, 50 bp, synthetic construct
  source 1..50: mol_type = other DNA
aaactgggggttaattttccccactagtgtttacaataaacccccatttg

SEQ ID NO: 51374 - DNA, 50 bp, synthetic construct
  source 1..50: mol_type = other DNA
taaaatcccctctccctttcctttataaactactatatagggcactgcat

SEQ ID NO: 51375 - DNA, 50 bp, synthetic construct
  source 1..50: mol_type = other DNA
atgtttctatttctaaaaaaatgtgataatttttttagaaaacacgatat

SEQ ID NO: 51376 - DNA, 50 bp, synthetic construct
  source 1..50: mol_type = other DNA
tgtaggcttcactgaaatactcgctagggcaattttcagatataggagca

SEQ ID NO: 51377 - DNA, 50 bp, synthetic construct
  source 1..50: mol_type = other DNA
ttcctttagttataattatcaaattattttaccgtataaaaacaaaaaag

SEQ ID NO: 51378 - DNA, 50 bp, synthetic construct
  source 1..50: mol_type = other DNA
atcttttctagcttcatcccactctcctgtgagaaaaggctaggacagat

SEQ ID NO: 51379 - DNA, 50 bp, synthetic construct
  source 1..50: mol_type = other DNA
gctaaatttatccatgatattctatgggctgaatacttgataaatttggc

SEQ ID NO: 51380 - DNA, 50 bp, synthetic construct
  source 1..50: mol_type = other DNA
taaagataagttttaaatttttaaagttatcttctccgcacttattgaca

SEQ ID NO: 51381 - DNA, 50 bp, synthetic construct
  source 1..50: mol_type = other DNA
cttttttcatggtgacacctgctaaatgcattgtatctgaaagaaaaaac

SEQ ID NO: 51382 - DNA, 50 bp, synthetic construct
  source 1..50: mol_type = other DNA
tacgcattcaggagagcgcctaaaacggtaggggcgtttttgtttggaaa

SEQ ID NO: 51383 - DNA, 50 bp, synthetic construct
  source 1..50: mol_type = other DNA
attgttcaccgtggtgaatttgtctttttaaataaaaattaaacaaaaat

SEQ ID NO: 51384 - DNA, 50 bp, synthetic construct
  source 1..50: mol_type = other DNA
tgtatcaattccagaactcacacttcggtgtgtgttctcaatttgataca

SEQ ID NO: 51385 - DNA, 50 bp, synthetic construct
  source 1..50: mol_type = other DNA
attatcaaatgtgaaactattatcatgtgatacaattcacacatgataat

SEQ ID NO: 51386 - DNA, 50 bp, synthetic construct
  source 1..50: mol_type = other DNA
attatttaaatacaactcagatcttaacacaaaggttatatttctatatc

SEQ ID NO: 51387 - DNA, 50 bp, synthetic construct
  source 1..50: mol_type = other DNA
taattttaaagctccagaatcagtttacttgttctgctgctttatcatct

SEQ ID NO: 51388 - DNA, 50 bp, synthetic construct
  source 1..50: mol_type = other DNA
gcaggagtatagggtttatttctttaaagatcgctgaaatatactcctgc

SEQ ID NO: 51389 - DNA, 50 bp, synthetic construct
  source 1..50: mol_type = other DNA
gtatcataagaaaggtgtaatcctcggctggaacgcctatcgcgcagcca

SEQ ID NO: 51390 - DNA, 50 bp, synthetic construct
  source 1..50: mol_type = other DNA
aacgttccacacgtgtaagcagtcctgtctacttagtatcttcctactat

SEQ ID NO: 51391 - DNA, 50 bp, synthetic construct
  source 1..50: mol_type = other DNA
tcagtaaatttaatatacagcatttcaaccaatgatagtaaatttactca

SEQ ID NO: 51392 - DNA, 50 bp, synthetic construct
  source 1..50: mol_type = other DNA
agtttggacaataatgaacaagttgagacggttgctttattgtccaaact

SEQ ID NO: 51393 - DNA, 50 bp, synthetic construct
  source 1..50: mol_type = other DNA
attgtatctgtcatcattatatcactacaatgtcaagcaattgttacata

SEQ ID NO: 51394 - DNA, 50 bp, synthetic construct
  source 1..50: mol_type = other DNA
cctattgtactatgttgatccttcataaagagtaaacattattgatgtgt

SEQ ID NO: 51395 - DNA, 50 bp, synthetic construct
  source 1..50: mol_type = other DNA
tgttcctatcctatggacaacacacatgtggagtgcatagcgttgataca

SEQ ID NO: 51396 - DNA, 50 bp, synthetic construct
  source 1..50: mol_type = other DNA
acacatcaataatgtttactctttatgaaggatcaacatagtacaatagg

SEQ ID NO: 51397 - DNA, 50 bp, synthetic construct
  source 1..50: mol_type = other DNA
ttaggatattgattttatttgcactagtgcaaataaaaaaagccctactt

SEQ ID NO: 51398 - DNA, 50 bp, synthetic construct
  source 1..50: mol_type = other DNA
gtgtatcataagaaaggggtattcctgaagagacctttctattgatacac

SEQ ID NO: 51399 - DNA, 50 bp, synthetic construct
  source 1..50: mol_type = other DNA
gtgtatcaatagaaaggtctcttcagaattacacctttcttatgatacac

SEQ ID NO: 51400 - DNA, 50 bp, synthetic construct
  source 1..50: mol_type = other DNA
aaaaatgtttgtaattgtgttttgatagtactattaatacaaacatagta

SEQ ID NO: 51401 - DNA, 50 bp, synthetic construct
  source 1..50: mol_type = other DNA
attgttacggtgttcactcatcaacgtttataagttcatctttaaatgat

SEQ ID NO: 51402 - DNA, 50 bp, synthetic construct
  source 1..50: mol_type = other DNA
ttaggatattaattttatttgcactagtgcaaataaaaaaatctacttcc

SEQ ID NO: 51403 - DNA, 50 bp, synthetic construct
  source 1..50: mol_type = other DNA
tataaattcatgtcgagctttctttgaaaaaatgaaagctgctctttata

SEQ ID NO: 51404 - DNA, 50 bp, synthetic construct
  source 1..50: mol_type = other DNA
agtttggacaatagtgctaccgtctcaacttgttcatcattgtccaaact

SEQ ID NO: 51405 - DNA, 50 bp, synthetic construct
  source 1..50: mol_type = other DNA
ttttgtggaaattatagagcgttttaaaattcttgattgaatcaaaaaag

SEQ ID NO: 51406 - DNA, 50 bp, synthetic construct
  source 1..50: mol_type = other DNA
aaaacgatgtttgagaaaggcaaaaattttgaaatatcatttttcttgtg

SEQ ID NO: 51407 - DNA, 50 bp, synthetic construct
  source 1..50: mol_type = other DNA
acatccgaaccgtgtatcacatggtaccagctgccttacggggaaaagtg

SEQ ID NO: 51408 - DNA, 50 bp, synthetic construct
  source 1..50: mol_type = other DNA
ttcacatatgaaactacattgtgatagcaaagggattactctcaatagaa

SEQ ID NO: 51409 - DNA, 50 bp, synthetic construct
  source 1..50: mol_type = other DNA
aaaagtttgtataaagtatatggtatatattaaacattaaacaaagtttt

SEQ ID NO: 51410 - DNA, 50 bp, synthetic construct
  source 1..50: mol_type = other DNA
atatatttatttaacagtgtgttgatccatacttcttctgccgtctatct

SEQ ID NO: 51411 - DNA, 50 bp, synthetic construct
  source 1..50: mol_type = other DNA
tttttccatatatgaaaacatatcacagtaaattttcatatctggaaatt

SEQ ID NO: 51412 - DNA, 50 bp, synthetic construct
  source 1..50: mol_type = other DNA
ttctattgagagtaatccctttgctatcaccatgtagtttcatatgtgaa

SEQ ID NO: 51413 - DNA, 50 bp, synthetic construct
  source 1..50: mol_type = other DNA
cgatgatgctcaaaaaagtttgtatacgcaaacttttcatgctttcggtt

SEQ ID NO: 51414 - DNA, 50 bp, synthetic construct
  source 1..50: mol_type = other DNA
gccattttttagcgattctgtgcttgttttaaaaatccataaaaaatata

SEQ ID NO: 51415 - DNA, 50 bp, synthetic construct
  source 1..50: mol_type = other DNA
acacaaatccccttgaactttgacttgtcaaagttaaacacttgcttgtt

SEQ ID NO: 51416 - DNA, 50 bp, synthetic construct
  source 1..50: mol_type = other DNA
ttgtaaacatatgactgtattatagccataatacagttaattgtttacac

SEQ ID NO: 51417 - DNA, 50 bp, synthetic construct
  source 1..50: mol_type = other DNA
cgtataggtatggtatcactcgggtgcccgaatgatacttaatgtatagc

SEQ ID NO: 51418 - DNA, 50 bp, synthetic construct
  source 1..50: mol_type = other DNA
cttagtaaatgtgtgagaaaagactagacgtatcatacacttttgaacgt

SEQ ID NO: 51419 - DNA, 50 bp, synthetic construct
  source 1..50: mol_type = other DNA
caatttagaaactttagcatcgcaattgcaatgcttggacaccttgattt

SEQ ID NO: 51420 - DNA, 50 bp, synthetic construct
  source 1..50: mol_type = other DNA
ataggagagggctacccaattttatggcgcagatgtgttgcttctggatg

SEQ ID NO: 51421 - DNA, 50 bp, synthetic construct
  source 1..50: mol_type = other DNA
ctgaactcttcacgaacaagtatggccacaatgtcaagtgatgaattcaa

SEQ ID NO: 51422 - DNA, 50 bp, synthetic construct
  source 1..50: mol_type = other DNA
caccctctgcaaaaaaggttacgttaacgatacttttgaaaacactggaa

SEQ ID NO: 51423 - DNA, 50 bp, synthetic construct
  source 1..50: mol_type = other DNA
actgtccgcaaaaaatgaccgactgatgtaggacggattttgcggacatt

SEQ ID NO: 51424 - DNA, 50 bp, synthetic construct
  source 1..50: mol_type = other DNA
gaaagagacgaaccgtgaaaaacacgtacccttaacggatgaaatattga

SEQ ID NO: 51425 - DNA, 50 bp, synthetic construct
  source 1..50: mol_type = other DNA
gatgattaattaaggatgtgtttgttgacacatcctgaaacttgggactt

SEQ ID NO: 51426 - DNA, 50 bp, synthetic construct
  source 1..50: mol_type = other DNA
agttgattaattaaggatgtgttcattgacacatcctgaaacttgggact

SEQ ID NO: 51427 - DNA, 50 bp, synthetic construct
  source 1..50: mol_type = other DNA
ggtatatacaactctattgtagcaataagggctttagagtgatatatagt

SEQ ID NO: 51428 - DNA, 50 bp, synthetic construct
  source 1..50: mol_type = other DNA
actatagtagcttttacaatcagtccaatgaagctaaagcgacctataga

SEQ ID NO: 51429 - DNA, 50 bp, synthetic construct
  source 1..50: mol_type = other DNA
gataggtctttattaaccttcataattttgtatatttattttttattcat

SEQ ID NO: 51430 - DNA, 50 bp, synthetic construct
  source 1..50: mol_type = other DNA
caatatctttaattaagggaaaggggagtttcccatagttaaagatacca

SEQ ID NO: 51431 - DNA, 50 bp, synthetic construct
  source 1..50: mol_type = other DNA
tatcctattgacaacacacgtggagtggagtgcatagcgttgatacaaag

SEQ ID NO: 51432 - DNA, 50 bp, synthetic construct
  source 1..50: mol_type = other DNA
taggtaataggctacaacatgttgctgttcatatggtagccgattaaggg

SEQ ID NO: 51433 - DNA, 50 bp, synthetic construct
  source 1..50: mol_type = other DNA
tccataatagcttctactccaaacttaggaggagttaaataacattgatt

SEQ ID NO: 51434 - DNA, 50 bp, synthetic construct
  source 1..50: mol_type = other DNA
agaccttgccgttccacctggtcccgggtgagggtgggcaaggtcaacga

SEQ ID NO: 51435 - DNA, 50 bp, synthetic construct
  source 1..50: mol_type = other DNA
ctattgtgtgtgaatagtattacacatgtgaagcatttcacacaaaattt

SEQ ID NO: 51436 - DNA, 50 bp, synthetic construct
  source 1..50: mol_type = other DNA
tggcgtaaatcatatcacagttccaagaagcagggaaacattttacgcag

SEQ ID NO: 51437 - DNA, 50 bp, synthetic construct
  source 1..50: mol_type = other DNA
cataactatttgaaaccactaggagtacgaggtgtctttaaacagttatg

SEQ ID NO: 51438 - DNA, 50 bp, synthetic construct
  source 1..50: mol_type = other DNA
tatgtattttgcctaactttcgggttgccgaaggataggcaaaatacata

SEQ ID NO: 51439 - DNA, 50 bp, synthetic construct
  source 1..50: mol_type = other DNA
tctcgggttaagactgctaccgtctcaacggtatcttcgtcaacccgaga

SEQ ID NO: 51440 - DNA, 50 bp, synthetic construct
  source 1..50: mol_type = other DNA
caaatcacctctgtacaattgtattaatgatattagaaaaacgggattat

SEQ ID NO: 51441 - DNA, 50 bp, synthetic construct
  source 1..50: mol_type = other DNA
taacaggtctcttagaaaaccgaatattcggcattgtagcattagccata

SEQ ID NO: 51442 - DNA, 50 bp, synthetic construct
  source 1..50: mol_type = other DNA
ctcatgctcggagtttgtatcctttttgtgatacaaatgcacgaaggtag

SEQ ID NO: 51443 - DNA, 50 bp, synthetic construct
  source 1..50: mol_type = other DNA
ccatgtttaggttcttatacaaataatgccgtatagcacgactttgcatt

SEQ ID NO: 51444 - DNA, 50 bp, synthetic construct
  source 1..50: mol_type = other DNA
aaagccactgattatcagtggctttttccccaaacacaaccctgagcctc

SEQ ID NO: 51445 - DNA, 50 bp, synthetic construct
  source 1..50: mol_type = other DNA
tcttgattggtggttttctttttatttaaagacaaatttacaaaacaaga

SEQ ID NO: 51446 - DNA, 50 bp, synthetic construct
  source 1..50: mol_type = other DNA
taataatgaatatagaagtattcttttttaatataagctatttaatatat

SEQ ID NO: 51447 - DNA, 50 bp, synthetic construct
  source 1..50: mol_type = other DNA
gctgtggatggtacgtctcatcatttattgcgtgttcaactaattccaca

SEQ ID NO: 51448 - DNA, 50 bp, synthetic construct
  source 1..50: mol_type = other DNA
gcataaataaataccgggacgctggacaccgtgatagtagcaatttacgc

SEQ ID NO: 51449 - DNA, 50 bp, synthetic construct
  source 1..50: mol_type = other DNA
atgtcaataatggaaacatatcccggaaaatagtaataagctgttgcaaa

SEQ ID NO: 51450 - DNA, 50 bp, synthetic construct
  source 1..50: mol_type = other DNA
ttacaactaagatcttatcgttttttcactgtttaaaatccacattcctg

SEQ ID NO: 51451 - DNA, 50 bp, synthetic construct
  source 1..50: mol_type = other DNA
aaactactcttggtctttctcaacatgggttgaaacacaaggaggaattt

SEQ ID NO: 51452 - DNA, 50 bp, synthetic construct
  source 1..50: mol_type = other DNA
taaataactcgtccttctgcaaaatattttagaagggaacgaatgatcta

SEQ ID NO: 51453 - DNA, 50 bp, synthetic construct
  source 1..50: mol_type = other DNA
aaattctttttgtggttcaacaaattcatagagaggggaatcaagcatgc

SEQ ID NO: 51454 - DNA, 50 bp, synthetic construct
  source 1..50: mol_type = other DNA
gttttcatgcgttccacataacaatattttagaagggaacgaatgatcta

SEQ ID NO: 51455 - DNA, 50 bp, synthetic construct
  source 1..50: mol_type = other DNA
ttcataccatttccaaaacaaaaagcttagattgtgcgtaaaaccaataa

SEQ ID NO: 51456 - DNA, 50 bp, synthetic construct
  source 1..50: mol_type = other DNA
gtggcgcgatcgcatcgcagaaccgcattgctgcgattcgttcgcgctct

SEQ ID NO: 51457 - DNA, 50 bp, synthetic construct
  source 1..50: mol_type = other DNA
tcactgactcagagcgtaaaacagtaatgctttacggaagtttagtgtga

SEQ ID NO: 51458 - DNA, 50 bp, synthetic construct
  source 1..50: mol_type = other DNA
atcaactatacagatctagaccgtcgtacatcatggcccgtatgagtgat

SEQ ID NO: 51459 - DNA, 50 bp, synthetic construct
  source 1..50: mol_type = other DNA
agatgtgcagaaattcatgcagggaatcctaaacgaatttctacacatta

SEQ ID NO: 51460 - DNA, 50 bp, synthetic construct
  source 1..50: mol_type = other DNA
tatacaattttatatttattaacttaagttaattctaaattctccagatt

SEQ ID NO: 51461 - DNA, 50 bp, synthetic construct
  source 1..50: mol_type = other DNA
tcattagtctggtaaatacttgggtaaagaagtatgggatataataacag

SEQ ID NO: 51462 - DNA, 50 bp, synthetic construct
  source 1..50: mol_type = other DNA
aaagaagtgtttatctccatcttgctggaataagagataaaaacacaatt

SEQ ID NO: 51463 - DNA, 50 bp, synthetic construct
  source 1..50: mol_type = other DNA
gaatgtcaaaaatgttattattatatagcatttgtgaatttttgaattgt

SEQ ID NO: 51464 - DNA, 50 bp, synthetic construct
  source 1..50: mol_type = other DNA
aattcactatactgttctaaattaataaatataaaattgtatatgaggtg

SEQ ID NO: 51465 - DNA, 50 bp, synthetic construct
  source 1..50: mol_type = other DNA
cctcatatacaattttatatttattacttcatttaaaattatattagaga

SEQ ID NO: 51466 - DNA, 50 bp, synthetic construct
  source 1..50: mol_type = other DNA
ataatgctgtacgcataaaaaatcaacttacattatacgagatgcatgtg

SEQ ID NO: 51467 - DNA, 50 bp, synthetic construct
  source 1..50: mol_type = other DNA
tttattattgaaatacatacttatttatcattatatatttttataataat

SEQ ID NO: 51468 - DNA, 50 bp, synthetic construct
  source 1..50: mol_type = other DNA
gttcacttaagccaacatatatcaatgctcatatgttagtttactgaaaa

SEQ ID NO: 51469 - DNA, 50 bp, synthetic construct
  source 1..50: mol_type = other DNA
tgctgaagaatctgctgctagctcttatattttcagcctgttcttcatca

SEQ ID NO: 51470 - DNA, 50 bp, synthetic construct
  source 1..50: mol_type = other DNA
ttttaaagagttatgatatttcataaaggaattaactaatgtttttaaaa

SEQ ID NO: 51471 - DNA, 50 bp, synthetic construct
  source 1..50: mol_type = other DNA
taagtaatcacctcatatataattttaaatatattatcggaactttttac

SEQ ID NO: 51472 - DNA, 50 bp, synthetic construct
  source 1..50: mol_type = other DNA
agcctgcgctcgtagatatcagtgacaactcgagctaagtcccgcaggca

SEQ ID NO: 51473 - DNA, 50 bp, synthetic construct
  source 1..50: mol_type = other DNA
gttctggttgtatccatgtacgctctaatcattgacgaaccaaccaacta

SEQ ID NO: 51474 - DNA, 50 bp, synthetic construct
  source 1..50: mol_type = other DNA
gtatacttttctcatagttacaccatctgaactcttagagaaaagcatac

SEQ ID NO: 51475 - DNA, 50 bp, synthetic construct
  source 1..50: mol_type = other DNA
cttttggttatttcccatcgtacacatggcagctatgaagaaaacggtag

SEQ ID NO: 51476 - DNA, 50 bp, synthetic construct
  source 1..50: mol_type = other DNA
tgtctgagaaatctgtatctaaaatatttatgatacagttctcccctctt

SEQ ID NO: 51477 - DNA, 50 bp, synthetic construct
  source 1..50: mol_type = other DNA
ctgttttaactttccattaggatataattcctattcaaactttaatacaa

SEQ ID NO: 51478 - DNA, 50 bp, synthetic construct
  source 1..50: mol_type = other DNA
taaattgatatgaaaaaaatataagtttccattttatctattagtatatt

SEQ ID NO: 51479 - DNA, 50 bp, synthetic construct
  source 1..50: mol_type = other DNA
cagagggcaccgacacacccccaagcattaccgtcagtatttgccgtcag

SEQ ID NO: 51480 - DNA, 50 bp, synthetic construct
  source 1..50: mol_type = other DNA
gttgaatttttcatttgcaaaaggtaccttttgcaaacaaaaaagagctt

SEQ ID NO: 51481 - DNA, 50 bp, synthetic construct
  source 1..50: mol_type = other DNA
tgcggcagccgcaccgcgacgacctcagtcctctccgtgcggctctccgt

SEQ ID NO: 51482 - DNA, 50 bp, synthetic construct
  source 1..50: mol_type = other DNA
atgaataatcccttctacgctgctttgatagcgctcgcagctttgcgtaa

SEQ ID NO: 51483 - DNA, 50 bp, synthetic construct
  source 1..50: mol_type = other DNA
ttgttaaggtggtggtatgcagcgcaaactgccatgcacctcaaaaacat

SEQ ID NO: 51484 - DNA, 50 bp, synthetic construct
  source 1..50: mol_type = other DNA
tgacagcaaaagccccgcgtgtaggaacactcggcgggctttcgcagtca

SEQ ID NO: 51485 - DNA, 50 bp, synthetic construct
  source 1..50: mol_type = other DNA
ggcactggcaagacgctgctcgccaggtattggttattctctcgcgtggg

SEQ ID NO: 51486 - DNA, 50 bp, synthetic construct
  source 1..50: mol_type = other DNA
atactagattccctaaagggcaaaaatttttttagtaatacttcttgtat

SEQ ID NO: 51487 - DNA, 50 bp, synthetic construct
  source 1..50: mol_type = other DNA
gaaaaaaagaagcagaaatgattttagtatattacctaattcttattttc

SEQ ID NO: 51488 - DNA, 50 bp, synthetic construct
  source 1..50: mol_type = other DNA
gcttgccacgctgagaggaaggtcgcaagcttcaaaggtgcttaagtcgg

SEQ ID NO: 51489 - DNA, 50 bp, synthetic construct
  source 1..50: mol_type = other DNA
tttgataaaaaatccgctttagtgagaagtatcgaactttttatttcaag

SEQ ID NO: 51490 - DNA, 50 bp, synthetic construct
  source 1..50: mol_type = other DNA
acatacacaaattagtgcatcatatctttaatacatatatttgtgtatgt

SEQ ID NO: 51491 - DNA, 50 bp, synthetic construct
  source 1..50: mol_type = other DNA
tttttaatgttcccattgattacggttgtaaactgtgggaacatttgcag

SEQ ID NO: 51492 - DNA, 50 bp, synthetic construct
  source 1..50: mol_type = other DNA
tcccatgcttacaagcagtgcatttaaatacaccatcttaaacgatacaa

SEQ ID NO: 51493 - DNA, 50 bp, synthetic construct
  source 1..50: mol_type = other DNA
ttgtattgctttaggtggtgtatttaaatacactatgaggatgattaggg

SEQ ID NO: 51494 - DNA, 50 bp, synthetic construct
  source 1..50: mol_type = other DNA
tcggttgcatgatgcgagtatgcgaatttatatcttcatccctcaattgc

SEQ ID NO: 51495 - DNA, 50 bp, synthetic construct
  source 1..50: mol_type = other DNA
cactgtgctttacggcttcggactggcgtaccctgccgtcctgcgccgtc

SEQ ID NO: 51496 - DNA, 50 bp, synthetic construct
  source 1..50: mol_type = other DNA
tagctttttccatagctgtaataccacaaagtcaactataaccttagcta

SEQ ID NO: 51497 - DNA, 50 bp, synthetic construct
  source 1..50: mol_type = other DNA
ctacctataataggtttatatttttctttatataaatctattatttatat

SEQ ID NO: 51498 - DNA, 50 bp, synthetic construct
  source 1..50: mol_type = other DNA
caaaaactatacgagttgttaccatatggtaaaaaaagaaatagctctta

SEQ ID NO: 51499 - DNA, 50 bp, synthetic construct
  source 1..50: mol_type = other DNA
gcgcccgccgcgcctgggtggcaaccctcagtcccaatcctcgctggcca

SEQ ID NO: 51500 - DNA, 50 bp, synthetic construct
  source 1..50: mol_type = other DNA
aaggctcctgagagtccctaaggggcgtcgtaaggacgccaaggaaaagg

SEQ ID NO: 51501 - DNA, 50 bp, synthetic construct
  source 1..50: mol_type = other DNA
ttgaatctaattttattatatattaaatactataacaaaaataaaacaaa

SEQ ID NO: 51502 - DNA, 50 bp, synthetic construct
  source 1..50: mol_type = other DNA
gcgcccgtgtgcgggcgctctttgatcaggaagcattggaacaggattcc

SEQ ID NO: 51503 - DNA, 50 bp, synthetic construct
  source 1..50: mol_type = other DNA
tgtaaatagtatagactagaaaatttttcttcttaaatatttcatacaca

SEQ ID NO: 51504 - DNA, 50 bp, synthetic construct
  source 1..50: mol_type = other DNA
taactacttttttaaaatatacaaaataatttattttaaaaaatgttaca

SEQ ID NO: 51505 - DNA, 50 bp, synthetic construct
  source 1..50: mol_type = other DNA
tcgaaccagctgttagaaaatatattgacattttctttttatgagtatat

SEQ ID NO: 51506 - DNA, 50 bp, synthetic construct
  source 1..50: mol_type = other DNA
tttatgtctataaaaacaaaaggagaacctaatgtttcttaagacataaa

SEQ ID NO: 51507 - DNA, 50 bp, synthetic construct
  source 1..50: mol_type = other DNA
gcccgggccgggccggtgcctacgcgacgcaccaccggcccgcggcaccc

SEQ ID NO: 51508 - DNA, 50 bp, synthetic construct
  source 1..50: mol_type = other DNA
cgaaacgccaaggacgtgatttattataaattcaaaaaccatgcttaaat

SEQ ID NO: 51509 - DNA, 50 bp, synthetic construct
  source 1..50: mol_type = other DNA
catatacagtcaatgcgtaaacgcatcactgtatatatgaacagtatatg

SEQ ID NO: 51510 - DNA, 50 bp, synthetic construct
  source 1..50: mol_type = other DNA
cctttccattatcagactttgtcgttttacagtttctggtaatgaatctg

SEQ ID NO: 51511 - DNA, 50 bp, synthetic construct
  source 1..50: mol_type = other DNA
taataacttttcgcatcattttgtcagcaaaacagtccgtaaagcaattc

SEQ ID NO: 51512 - DNA, 50 bp, synthetic construct
  source 1..50: mol_type = other DNA
caaagcgttttgcttgagaaactcatgtgtctgtgaagtaaaacactttg

SEQ ID NO: 51513 - DNA, 50 bp, synthetic construct
  source 1..50: mol_type = other DNA
agaagcgagaccttctttcatttttaaaactctcggaaacgagcgctttt

SEQ ID NO: 51514 - DNA, 50 bp, synthetic construct
  source 1..50: mol_type = other DNA
cgtcgagggcgtcgccgacagtgtcatcaccgtgtgccagcgcctcgacg

SEQ ID NO: 51515 - DNA, 50 bp, synthetic construct
  source 1..50: mol_type = other DNA
gacggcgcgcatgtcctgaaccatcagaggctgagcgcctgcgcgccgag

SEQ ID NO: 51516 - DNA, 50 bp, synthetic construct
  source 1..50: mol_type = other DNA
ggttgccggcctgatcggcgcggcgcgccttggggcaccctaacgaaacc

SEQ ID NO: 51517 - DNA, 50 bp, synthetic construct
  source 1..50: mol_type = other DNA
ggttcttgtatccatcgtgaccggttcatgccacgctggatacaagcgcg

SEQ ID NO: 51518 - DNA, 50 bp, synthetic construct
  source 1..50: mol_type = other DNA
tgtatccaacgtgaccagttgtgcgaaactttcattccacgacggataca

SEQ ID NO: 51519 - DNA, 50 bp, synthetic construct
  source 1..50: mol_type = other DNA
tgtatccatcgtgaccggttgtgcgaaactttcatgccacgacggataca

SEQ ID NO: 51520 - DNA, 50 bp, synthetic construct
  source 1..50: mol_type = other DNA
gccagctgcgaggtttccgcctgagcccgtccgggccaatagcacggcga

SEQ ID NO: 51521 - DNA, 50 bp, synthetic construct
  source 1..50: mol_type = other DNA
tgcaacatgtgttgatcaccacgatatcgtggcgaagaacatacacatca

SEQ ID NO: 51522 - DNA, 50 bp, synthetic construct
  source 1..50: mol_type = other DNA
agccacgacatgtgttcatcaccatgtggtgaagaacacacaatcatgcg

SEQ ID NO: 51523 - DNA, 50 bp, synthetic construct
  source 1..50: mol_type = other DNA
tgtgggtcttgtgaagacaccatgagcatggtattttcaaaggacctcct

SEQ ID NO: 51524 - DNA, 50 bp, synthetic construct
  source 1..50: mol_type = other DNA
aaaaaatttcatcggcaccgcgtatatgccataaagtcggagcatttgtt

SEQ ID NO: 51525 - DNA, 50 bp, synthetic construct
  source 1..50: mol_type = other DNA
ttggccccggatcctgatgatcgggcaccacatgcttaacgcatagccaa

SEQ ID NO: 51526 - DNA, 50 bp, synthetic construct
  source 1..50: mol_type = other DNA
acgtgtgttgatcaccacgatcttgcaataacgtggcgaagaacacacaa

SEQ ID NO: 51527 - DNA, 50 bp, synthetic construct
  source 1..50: mol_type = other DNA
cggctcacggcgcaattgtattttgcaaaagacattttaccacgtggcat

SEQ ID NO: 51528 - DNA, 50 bp, synthetic construct
  source 1..50: mol_type = other DNA
gggagaggctgtgtctattttgtatttccaggcgcggcacgtcttccggc

SEQ ID NO: 51529 - DNA, 50 bp, synthetic construct
  source 1..50: mol_type = other DNA
gaggggtcttgtgaaaacaacatgctaatagtattctcaacggacccgat

SEQ ID NO: 51530 - DNA, 50 bp, synthetic construct
  source 1..50: mol_type = other DNA
ggtttacacggagagttctacgtcacgccgtagaacactcggtataacca

SEQ ID NO: 51531 - DNA, 50 bp, synthetic construct
  source 1..50: mol_type = other DNA
ctctaggatggtgcaattactatttgggtgataattgcaccacggaaaac

SEQ ID NO: 51532 - DNA, 50 bp, synthetic construct
  source 1..50: mol_type = other DNA
taggaatcatcctcatagtgtatttaaacacatcattttaggtattgaat

SEQ ID NO: 51533 - DNA, 50 bp, synthetic construct
  source 1..50: mol_type = other DNA
catcgctatattattttattaagtatacttaacttaatatcataagatct

SEQ ID NO: 51534 - DNA, 50 bp, synthetic construct
  source 1..50: mol_type = other DNA
ctttagatggtgtatttaaacgtgtcaaggtctaaatgcactatgaggat

SEQ ID NO: 51535 - DNA, 50 bp, synthetic construct
  source 1..50: mol_type = other DNA
ttcaatggtgcggcctgcccggtcgcgtcctgggcggcggcaccatcctg

SEQ ID NO: 51536 - DNA, 50 bp, synthetic construct
  source 1..50: mol_type = other DNA
tcgccaccccggcacagttcgatgcctcccgacgggaagtggcggggcga

SEQ ID NO: 51537 - DNA, 50 bp, synthetic construct
  source 1..50: mol_type = other DNA
ggcatagatgacgcagcggggcatggttgccgcgctggtgtctccgcgcc

SEQ ID NO: 51538 - DNA, 50 bp, synthetic construct
  source 1..50: mol_type = other DNA
ttatggctaatgctacaatgccgaattcggttttttaagagacctgttat

SEQ ID NO: 51539 - DNA, 50 bp, synthetic construct
  source 1..50: mol_type = other DNA
cgctggaggccgaggaggccgcgcgctcgccagacaggccgccgcccgcg

SEQ ID NO: 51540 - DNA, 50 bp, synthetic construct
  source 1..50: mol_type = other DNA
cctgcatcattcgacctcactttaaccaaggttgggtcataaaatgcaat

SEQ ID NO: 51541 - DNA, 50 bp, synthetic construct
  source 1..50: mol_type = other DNA
gcaagttgcgtgcagctgatcgcggccacgtccggccgcggctcagctgc

SEQ ID NO: 51542 - DNA, 50 bp, synthetic construct
  source 1..50: mol_type = other DNA
cccagctccagcagccggcacacgagcgtatgacggcgaatgtacctgtc

SEQ ID NO: 51543 - DNA, 50 bp, synthetic construct
  source 1..50: mol_type = other DNA
tcaccggcacggcctgctgcatggccggattcagcaggccgttggggatc

SEQ ID NO: 51544 - DNA, 50 bp, synthetic construct
  source 1..50: mol_type = other DNA
cagtccgagaggatgcggagtcttctgggagtctggaagctctccgtaga

SEQ ID NO: 51545 - DNA, 50 bp, synthetic construct
  source 1..50: mol_type = other DNA
cggccagtgagtcgccggcgacgagcacatcgctccagcaggacgtctcg

SEQ ID NO: 51546 - DNA, 50 bp, synthetic construct
  source 1..50: mol_type = other DNA
ctgataaaggcggctggagcgtttggtattgcgccagccgctggaatcag

SEQ ID NO: 51547 - DNA, 50 bp, synthetic construct
  source 1..50: mol_type = other DNA
tcatcctgatatccttttaagtatatagatcgcatccacgatccacaact

SEQ ID NO: 51548 - DNA, 50 bp, synthetic construct
  source 1..50: mol_type = other DNA
tttctttaggggtctagtgctatacaggaggtagcacccatggcaagaag

SEQ ID NO: 51549 - DNA, 50 bp, synthetic construct
  source 1..50: mol_type = other DNA
agcaccacgtggaggcggtgcccctcggagcagatcctccaggccgtccg

SEQ ID NO: 51550 - DNA, 50 bp, synthetic construct
  source 1..50: mol_type = other DNA
tgcggcctcctcgccattttcagtatcttgccaccggccttgaggccttg

SEQ ID NO: 51551 - DNA, 50 bp, synthetic construct
  source 1..50: mol_type = other DNA
ggcaccgagcccggcgactcgctacgcagagcgtcgagggcctggctgct

SEQ ID NO: 51552 - DNA, 50 bp, synthetic construct
  source 1..50: mol_type = other DNA
atccaaaccctgaagacgaaaaaagcggctcttaggatcatggcttggct

SEQ ID NO: 51553 - DNA, 50 bp, synthetic construct
  source 1..50: mol_type = other DNA
tcttctttgcagaacaagaaatatattaaataaattttaggcaaaatgcc

SEQ ID NO: 51554 - DNA, 50 bp, synthetic construct
  source 1..50: mol_type = other DNA
ccatatgtgttttttgtaagtactgcattaccattttcaatgcgatatcc

SEQ ID NO: 51555 - DNA, 50 bp, synthetic construct
  source 1..50: mol_type = other DNA
gtgttggtaaatattggtttatctttagataaaatctttattaccaacag

SEQ ID NO: 51556 - DNA, 50 bp, synthetic construct
  source 1..50: mol_type = other DNA
taacgaacgagcttccattattgacgtttctaatggagatcttatcgaag

SEQ ID NO: 51557 - DNA, 50 bp, synthetic construct
  source 1..50: mol_type = other DNA
atgtgcgtttagcgggagttcccgaccaggaactccctctaaacacacac

SEQ ID NO: 51558 - DNA, 50 bp, synthetic construct
  source 1..50: mol_type = other DNA
tgcaggcgagcaacgcaacgttgcgcgtcaggttgcgtgccaggtcgcct

SEQ ID NO: 51559 - DNA, 50 bp, synthetic construct
  source 1..50: mol_type = other DNA
ataaaaaccgctactaaagaggatatctcctcatcactgcggttttcaag

SEQ ID NO: 51560 - DNA, 50 bp, synthetic construct
  source 1..50: mol_type = other DNA
ttatgaagcggctgaaaaaaccgcatgcggtttttaaactacggatcaat

SEQ ID NO: 51561 - DNA, 50 bp, synthetic construct
  source 1..50: mol_type = other DNA
tcaacagaccttgaaacttttctaaagggaagatgtttacttccccttta

SEQ ID NO: 51562 - DNA, 50 bp, synthetic construct
  source 1..50: mol_type = other DNA
ctgaaaaaaccgcatcatttatgatatcgttttatactggggtttttata

SEQ ID NO: 51563 - DNA, 50 bp, synthetic construct
  source 1..50: mol_type = other DNA
gcctggccgagtcgcgcgccggcggccgccgaggcccgggcgggctagtc

SEQ ID NO: 51564 - DNA, 50 bp, synthetic construct
  source 1..50: mol_type = other DNA
aattaaaaacctcatcatttatgatatcgttttatactggggtttttata

SEQ ID NO: 51565 - DNA, 50 bp, synthetic construct
  source 1..50: mol_type = other DNA
tgaagcggctgaaaaaaccgcatcatgatgcggtttttgaaaaataacta

SEQ ID NO: 51566 - DNA, 50 bp, synthetic construct
  source 1..50: mol_type = other DNA
aaatggcattggccacacaaccggatgtggtgatgcagccagaatatgac

SEQ ID NO: 51567 - DNA, 50 bp, synthetic construct
  source 1..50: mol_type = other DNA
ccatggcctgttctgtgatgacccgttgaatcgcccggaactgacccgcg

SEQ ID NO: 51568 - DNA, 50 bp, synthetic construct
  source 1..50: mol_type = other DNA
cttacttatctacccttgacatcaattgatagctatcaaaagtaagtttt

SEQ ID NO: 51569 - DNA, 50 bp, synthetic construct
  source 1..50: mol_type = other DNA
tcgctagcaacttcatatcttcggacaggtaactatgaagttgctaggaa

SEQ ID NO: 51570 - DNA, 50 bp, synthetic construct
  source 1..50: mol_type = other DNA
ctcatatagttacctccttaattatttcaataacgaaagaacaaattgaa

SEQ ID NO: 51571 - DNA, 50 bp, synthetic construct
  source 1..50: mol_type = other DNA
gagcctagcacggtagatatcagagcccgccttgctggcgaaggctgcac

SEQ ID NO: 51572 - DNA, 50 bp, synthetic construct
  source 1..50: mol_type = other DNA
acaaggctgattgtggtataataaatcaaggactaatttttccagcttgt

SEQ ID NO: 51573 - DNA, 50 bp, synthetic construct
  source 1..50: mol_type = other DNA
cgagatgctggccgggcggcaggcgcccgcagcgcttcgcgagcaggtat

SEQ ID NO: 51574 - DNA, 50 bp, synthetic construct
  source 1..50: mol_type = other DNA
tttactagcttcatcatttattaaccatatataagtatggatgttttaaa

SEQ ID NO: 51575 - DNA, 50 bp, synthetic construct
  source 1..50: mol_type = other DNA
tggcttttcatttattaatttttgtacaaaaattaaatatcaaaagtata

SEQ ID NO: 51576 - DNA, 50 bp, synthetic construct
  source 1..50: mol_type = other DNA
tctgttaacttatatatacaatactagcattagccataacgtttataagt

SEQ ID NO: 51577 - DNA, 50 bp, synthetic construct
  source 1..50: mol_type = other DNA
aaactaagggaattaggatcatatgaatatggaagaaattgtggccctta

SEQ ID NO: 51578 - DNA, 50 bp, synthetic construct
  source 1..50: mol_type = other DNA
cgatatttttatgcaggtggttgttattaaccacttacataaacatagac

SEQ ID NO: 51579 - DNA, 50 bp, synthetic construct
  source 1..50: mol_type = other DNA
tgttaccgcgcgacgtgggcggctgcagcgaacgtgacagcgcggcatcg

SEQ ID NO: 51580 - DNA, 50 bp, synthetic construct
  source 1..50: mol_type = other DNA
tcggcgacgcgctgccgctcgtcgtgaaatgcagctggacgcgtcgctca

SEQ ID NO: 51581 - DNA, 50 bp, synthetic construct
  source 1..50: mol_type = other DNA
cgcgtgcggccgttgcccgagctggccagtaattcgcacggtcagtcatt

SEQ ID NO: 51582 - DNA, 50 bp, synthetic construct
  source 1..50: mol_type = other DNA
cgcagtgcaagcgtcggtgtcccgcgaagaacgccgacgccgcgcgggcg

SEQ ID NO: 51583 - DNA, 50 bp, synthetic construct
  source 1..50: mol_type = other DNA
gtatccctcgggtgcccgaaagccctcgcattcgtgccgcgtacggccgc

SEQ ID NO: 51584 - DNA, 50 bp, synthetic construct
  source 1..50: mol_type = other DNA
ttcccattcaaatgttcggaagctgtaggatgagaggatgcgaaagcgtc

SEQ ID NO: 51585 - DNA, 50 bp, synthetic construct
  source 1..50: mol_type = other DNA
tataaagctgtttggcatttaccgatcggtaacactaaagtaaaatacac

SEQ ID NO: 51586 - DNA, 50 bp, synthetic construct
  source 1..50: mol_type = other DNA
ccttcaggttatgagcctgacgagctcgatccaggaatatatcctgcgct

SEQ ID NO: 51587 - DNA, 50 bp, synthetic construct
  source 1..50: mol_type = other DNA
ctagtcgaacatacgacggttgcgacctcgaccgtgaagccgtcggctcc

SEQ ID NO: 51588 - DNA, 50 bp, synthetic construct
  source 1..50: mol_type = other DNA
cctgaaaggcaccctgttctgcggccaacgataagccgacgcccgcctgc

SEQ ID NO: 51589 - DNA, 50 bp, synthetic construct
  source 1..50: mol_type = other DNA
gccaatgggtttgtttttctgtttttgtgcagtaagctaaaatgatgaaa

SEQ ID NO: 51590 - DNA, 50 bp, synthetic construct
  source 1..50: mol_type = other DNA
atggagagtaattgttccgacgcctcggggctcacagcatctctctcaag

SEQ ID NO: 51591 - DNA, 50 bp, synthetic construct
  source 1..50: mol_type = other DNA
gtcatccggccgacgccggcgcgtcgagttgcccgctcgcgggcgacggg

SEQ ID NO: 51592 - DNA, 50 bp, synthetic construct
  source 1..50: mol_type = other DNA
taatacgatcaatgggctaacgaatacatatttcagaatctcatgtattg

SEQ ID NO: 51593 - DNA, 50 bp, synthetic construct
  source 1..50: mol_type = other DNA
gagcaagaatatccccaggcactcaactggatctctacatctgcctgcgt

SEQ ID NO: 51594 - DNA, 50 bp, synthetic construct
  source 1..50: mol_type = other DNA
tcgactgacgggcgtacacgcccacccaggcgtcggcgcccgagaagtac

SEQ ID NO: 51595 - DNA, 50 bp, synthetic construct
  source 1..50: mol_type = other DNA
caccttttaaatcgccaaaatcttcaaccatttttcttatttaatttgaa

SEQ ID NO: 51596 - DNA, 50 bp, synthetic construct
  source 1..50: mol_type = other DNA
atggatatagaattgaagatggaaaaacgcatctgaaaagctatacccta

SEQ ID NO: 51597 - DNA, 50 bp, synthetic construct
  source 1..50: mol_type = other DNA
aaaacaaatgaatattttgtttttataaaaaaagaatatggattaatttg

SEQ ID NO: 51598 - DNA, 50 bp, synthetic construct
  source 1..50: mol_type = other DNA
attggtatgtagtttttccgatagtactatcggatcaaggtgtctcagcc

SEQ ID NO: 51599 - DNA, 50 bp, synthetic construct
  source 1..50: mol_type = other DNA
cttttcttctactaacgcacatccgaacatgttacttttaaatcaaaaaa

SEQ ID NO: 51600 - DNA, 50 bp, synthetic construct
  source 1..50: mol_type = other DNA
ttgataccagcaattttatacagatttcacgatttcattctttgtatcaa

SEQ ID NO: 51601 - DNA, 50 bp, synthetic construct
  source 1..50: mol_type = other DNA
ttttaccgctattatgctcataaagtattctctgtaacataacgataaat

SEQ ID NO: 51602 - DNA, 50 bp, synthetic construct
  source 1..50: mol_type = other DNA
gttatcttttcaaaattcctcactttgatgctaaattctacgaaggtgat

SEQ ID NO: 51603 - DNA, 50 bp, synthetic construct
  source 1..50: mol_type = other DNA
aggacaacgtttagaaactttgatacgtcaccaatgctaacagtaacgct

SEQ ID NO: 51604 - DNA, 50 bp, synthetic construct
  source 1..50: mol_type = other DNA
ttatccttcaactattcagtacctttaggtattgaatatgagacgggcaa

SEQ ID NO: 51605 - DNA, 50 bp, synthetic construct
  source 1..50: mol_type = other DNA
accttatgtcagtattccatatgctgtaatatacactatataaataagct

SEQ ID NO: 51606 - DNA, 50 bp, synthetic construct
  source 1..50: mol_type = other DNA
cataacgaaatttgtagggaactttaaacttcccgtaatgttgttttgcg

SEQ ID NO: 51607 - DNA, 50 bp, synthetic construct
  source 1..50: mol_type = other DNA
atatatcaagtcttatagcaataattaccttgataagtttcttgatttaa

SEQ ID NO: 51608 - DNA, 50 bp, synthetic construct
  source 1..50: mol_type = other DNA
cctccttattttatcagtactatataatctccacttggtttatagtgatg

SEQ ID NO: 51609 - DNA, 50 bp, synthetic construct
  source 1..50: mol_type = other DNA
aagtacatttctcctggagaaaatatattatatcacgtagacgctttctt

SEQ ID NO: 51610 - DNA, 50 bp, synthetic construct
  source 1..50: mol_type = other DNA
aactatttcatttttcactttattataaagagcagaaaaactgctctgtt

SEQ ID NO: 51611 - DNA, 50 bp, synthetic construct
  source 1..50: mol_type = other DNA
tatatgtagagtagtttggcaaggggcgtgaacaggaagctacacaatta

SEQ ID NO: 51612 - DNA, 50 bp, synthetic construct
  source 1..50: mol_type = other DNA
agctttgcttttagcgcacaaggattcggcactaatctaatccactactt

SEQ ID NO: 51613 - DNA, 50 bp, synthetic construct
  source 1..50: mol_type = other DNA
ggtttgcaaaaggtactcatagcatttgaaatgcgtacctattgcaaacc

SEQ ID NO: 51614 - DNA, 50 bp, synthetic construct
  source 1..50: mol_type = other DNA
aggtttaaaagccattgccaatcacctgaactcgaaaaacttttaaagga

SEQ ID NO: 51615 - DNA, 50 bp, synthetic construct
  source 1..50: mol_type = other DNA
atgaaacccatagagaaaatcatggccttagtcggcgcggctggcgtcat

SEQ ID NO: 51616 - DNA, 50 bp, synthetic construct
  source 1..50: mol_type = other DNA
tgtaatttcaacaaatttatcttctagaacatattttggaaatatgtatg

SEQ ID NO: 51617 - DNA, 50 bp, synthetic construct
  source 1..50: mol_type = other DNA
aaatggcctatgtaccatacggatatacgtttcactttcaaagccttctt

SEQ ID NO: 51618 - DNA, 50 bp, synthetic construct
  source 1..50: mol_type = other DNA
ggctggcatgagtcgcacggtcactgctggccgtgctcgtcatatgagta

SEQ ID NO: 51619 - DNA, 50 bp, synthetic construct
  source 1..50: mol_type = other DNA
gcggtggcgcgttgatgatgaacgccggtggggttaaccagtgaggggag

SEQ ID NO: 51620 - DNA, 50 bp, synthetic construct
  source 1..50: mol_type = other DNA
agaaaaagaagcggagaatataagaaaaaagttctaaaactactttttct

SEQ ID NO: 51621 - DNA, 50 bp, synthetic construct
  source 1..50: mol_type = other DNA
tttcaaatataacatgtgctacaatatttttttaagaaagaaattagcaa

SEQ ID NO: 51622 - DNA, 50 bp, synthetic construct
  source 1..50: mol_type = other DNA
tatttaaaagggtcaaaaaacggtatataattttttaggactttttttct

SEQ ID NO: 51623 - DNA, 50 bp, synthetic construct
  source 1..50: mol_type = other DNA
atattttcacgttatagttatacctaattattgctataattagaagatat

SEQ ID NO: 51624 - DNA, 50 bp, synthetic construct
  source 1..50: mol_type = other DNA
tttgtttgtagaacacatcatacatttgaataacggctaatgtaaacaaa

SEQ ID NO: 51625 - DNA, 50 bp, synthetic construct
  source 1..50: mol_type = other DNA
tcgagccatcgcgatcggccagggcgaccgaagagaaagcgatgaagcgc

SEQ ID NO: 51626 - DNA, 50 bp, synthetic construct
  source 1..50: mol_type = other DNA
ggaaatgtcatctttgaaaagcttagaaaggttaataattagacctttta

SEQ ID NO: 51627 - DNA, 50 bp, synthetic construct
  source 1..50: mol_type = other DNA
gggcttggacgggttgtgcaatatcaatattcatcactccttcctgccgg

SEQ ID NO: 51628 - DNA, 50 bp, synthetic construct
  source 1..50: mol_type = other DNA
ttcaaaattttttttcgcttcttcaaaatgaaataaaaaaagattttttt

SEQ ID NO: 51629 - DNA, 50 bp, synthetic construct
  source 1..50: mol_type = other DNA
aattacaaagaaaatcatcaatttcttcattattgaatttctacaaaaac

SEQ ID NO: 51630 - DNA, 50 bp, synthetic construct
  source 1..50: mol_type = other DNA
acacactcacatttgattatactttaaaatcaaaaatataatcgatgtgt

SEQ ID NO: 51631 - DNA, 50 bp, synthetic construct
  source 1..50: mol_type = other DNA
atttaattgcgttagagagcctctaaagagtttatcagcaagaagtaagg

SEQ ID NO: 51632 - DNA, 50 bp, synthetic construct
  source 1..50: mol_type = other DNA
tcaagttgtgggacttgatagagtatacgtatttaactaaaattgcatga

SEQ ID NO: 51633 - DNA, 50 bp, synthetic construct
  source 1..50: mol_type = other DNA
ttttagcggtgaaatgggaatggcgcgcccacccggcggcatttcgaacg

SEQ ID NO: 51634 - DNA, 50 bp, synthetic construct
  source 1..50: mol_type = other DNA
aacagtggaaatccagttattattaaaataataactactatttcattcaa

SEQ ID NO: 51635 - DNA, 50 bp, synthetic construct
  source 1..50: mol_type = other DNA
cttacctgctttgtactggttaagtgcttaataatgctggtgcaggtaat

SEQ ID NO: 51636 - DNA, 50 bp, synthetic construct
  source 1..50: mol_type = other DNA
cagcttttaaatattttttaagtttttgattaaaaagtacttatctaatc

SEQ ID NO: 51637 - DNA, 50 bp, synthetic construct
  source 1..50: mol_type = other DNA
tctcggttcccgctttcatcacaaagtggcgggctacatgggacgaatat

SEQ ID NO: 51638 - DNA, 50 bp, synthetic construct
  source 1..50: mol_type = other DNA
tgtgataagttgttttactgggttaattagcacaacacaaagctatcagg

SEQ ID NO: 51639 - DNA, 50 bp, synthetic construct
  source 1..50: mol_type = other DNA
tttttcttacacattcctaggagttatacctgcgccatgtgcaagaaaaa

SEQ ID NO: 51640 - DNA, 50 bp, synthetic construct
  source 1..50: mol_type = other DNA
tgaagcacaggtaaattactatactaaaattgcaagagagtgaagcttca

SEQ ID NO: 51641 - DNA, 50 bp, synthetic construct
  source 1..50: mol_type = other DNA
ataataaaataagaggctgattgtgattaatataaaaacagttatattag

SEQ ID NO: 51642 - DNA, 50 bp, synthetic construct
  source 1..50: mol_type = other DNA
gtgaccaccggaaccgacaagagcggactcttgcacgtcaggcggctcgg

SEQ ID NO: 51643 - DNA, 50 bp, synthetic construct
  source 1..50: mol_type = other DNA
tatgtatagcctcaatgggccgcttcttccgcccatccaggctgtacatg

SEQ ID NO: 51644 - DNA, 50 bp, synthetic construct
  source 1..50: mol_type = other DNA
ggccattgtctttatgggacatgaattcatgataggaggaatttatgcca

SEQ ID NO: 51645 - DNA, 50 bp, synthetic construct
  source 1..50: mol_type = other DNA
caggcgggtggccgcgtatgcgcgagagcgcactggcgcacaagcaagtc

SEQ ID NO: 51646 - DNA, 50 bp, synthetic construct
  source 1..50: mol_type = other DNA
tcgggggcgctattgcgtgggttgctcaacttgctgaagaattttcagtt

SEQ ID NO: 51647 - DNA, 50 bp, synthetic construct
  source 1..50: mol_type = other DNA
tcagctcgaagcgctttccgccgccggcgaccctgcgcagggttgtctgt

SEQ ID NO: 51648 - DNA, 50 bp, synthetic construct
  source 1..50: mol_type = other DNA
tttttatattttattttaccctacaataagggtaaaaggttaagggaagc

SEQ ID NO: 51649 - DNA, 50 bp, synthetic construct
  source 1..50: mol_type = other DNA
gttttaggttcttataataaaaatagactttaggagaaaggccgtacatg

SEQ ID NO: 51650 - DNA, 50 bp, synthetic construct
  source 1..50: mol_type = other DNA
ccatcaggcggggcaagtttcgatttgtcgaaactcaccccgtcactggg

SEQ ID NO: 51651 - DNA, 50 bp, synthetic construct
  source 1..50: mol_type = other DNA
gtaccctctctcgtgttgatgggtacccccaataactaaaatttttattc

SEQ ID NO: 51652 - DNA, 50 bp, synthetic construct
  source 1..50: mol_type = other DNA
gtgtatcaatagaaaggtctctttaggattacacctttcttatgatacac

SEQ ID NO: 51653 - DNA, 50 bp, synthetic construct
  source 1..50: mol_type = other DNA
tgtggcctttgtattgaaaactgctcgcatactttaggagaaaggccgta

SEQ ID NO: 51654 - DNA, 50 bp, synthetic construct
  source 1..50: mol_type = other DNA
taatgtgtagaaattactcttggattcccaaaatgattttctacacatga

SEQ ID NO: 51655 - DNA, 50 bp, synthetic construct
  source 1..50: mol_type = other DNA
ttaggatattgattttatttgcactagtgcaaacaaaaaaagctctactc

SEQ ID NO: 51656 - DNA, 50 bp, synthetic construct
  source 1..50: mol_type = other DNA
ataggatattgattttatttgcactagtgcaaacaaaaaagctctactcc

SEQ ID NO: 51657 - DNA, 50 bp, synthetic construct
  source 1..50: mol_type = other DNA
tgtatcaacgctatagtctccacatgattggggacataattttttatcct

SEQ ID NO: 51658 - DNA, 50 bp, synthetic construct
  source 1..50: mol_type = other DNA
agtgtacaaataaagaaaacaacgcacgtggagtgtgtagtgttgctaca

SEQ ID NO: 51659 - DNA, 50 bp, synthetic construct
  source 1..50: mol_type = other DNA
tctaggaaaaaattaactagcaccacggtcctccctaacgactcatctaa

SEQ ID NO: 51660 - DNA, 50 bp, synthetic construct
  source 1..50: mol_type = other DNA
gtgttgtatcttgatgtacaacattaatgttgcatataatattactactt

SEQ ID NO: 51661 - DNA, 50 bp, synthetic construct
  source 1..50: mol_type = other DNA
aataaaaaatggaatctttattgaaaaagttatcgttttacattattatt

SEQ ID NO: 51662 - DNA, 50 bp, synthetic construct
  source 1..50: mol_type = other DNA
tgtatcatatacattgttattctatctatttagacgttgtcggtgataca

SEQ ID NO: 51663 - DNA, 50 bp, synthetic construct
  source 1..50: mol_type = other DNA
aagtgtgccgagctggcgccgagcgcgcccggcgcgcgatcaacgcgccg

SEQ ID NO: 51664 - DNA, 50 bp, synthetic construct
  source 1..50: mol_type = other DNA
ttggcccaagatcgacagccttgggtccagacgaggcgatcttacgcctt

SEQ ID NO: 51665 - DNA, 50 bp, synthetic construct
  source 1..50: mol_type = other DNA
tgaatttttttcttttatttctttaaagtcaaaaaaaaaaaaaaacagcc

SEQ ID NO: 51666 - DNA, 50 bp, synthetic construct
  source 1..50: mol_type = other DNA
ttttaaatagaagtttcaccagattataaacgttataattttctttataa

SEQ ID NO: 51667 - DNA, 50 bp, synthetic construct
  source 1..50: mol_type = other DNA
ccctcctttttatatctttttaaagtttataatagctattaaagggaggg

SEQ ID NO: 51668 - DNA, 50 bp, synthetic construct
  source 1..50: mol_type = other DNA
cgtttatgctttgtcgtcaccttgttgtttatcaccacaagaaataatac

SEQ ID NO: 51669 - DNA, 50 bp, synthetic construct
  source 1..50: mol_type = other DNA
acgaatgtctgaggatttttgtggtggtgaaaaggcactctggcaagcac

SEQ ID NO: 51670 - DNA, 50 bp, synthetic construct
  source 1..50: mol_type = other DNA
cccttctatgaatatgttttttcctccatgcaaaaatttaaaagagagcc

SEQ ID NO: 51671 - DNA, 50 bp, synthetic construct
  source 1..50: mol_type = other DNA
aacctttgcctgccagcgtgccagtgctcgcaacggcgcaggaacttggc

SEQ ID NO: 51672 - DNA, 50 bp, synthetic construct
  source 1..50: mol_type = other DNA
taaaatggtatacataagatgaatttcttcttcattaatatataatttag

SEQ ID NO: 51673 - DNA, 50 bp, synthetic construct
  source 1..50: mol_type = other DNA
caagttggctccccgagtaggattcgaatccgccttgatgaggcagaccg

SEQ ID NO: 51674 - DNA, 50 bp, synthetic construct
  source 1..50: mol_type = other DNA
acgacctgtttagccaacctaatgttggttagagcacacgactcataatc

SEQ ID NO: 51675 - DNA, 50 bp, synthetic construct
  source 1..50: mol_type = other DNA
gaagcggtgcatgaagcactgccgccgcgtctgcgatcatgcactcgttc

SEQ ID NO: 51676 - DNA, 50 bp, synthetic construct
  source 1..50: mol_type = other DNA
cgtaatttcggtctaaacctgttttaaaacagtaaaatcaaaaaatggtg

SEQ ID NO: 51677 - DNA, 50 bp, synthetic construct
  source 1..50: mol_type = other DNA
ttgggtttttccgttttattatactcacttaactaaataaacttgcccaa

SEQ ID NO: 51678 - DNA, 50 bp, synthetic construct
  source 1..50: mol_type = other DNA
taatcaactttataaatatatacaattgtacttatttagaattgtttgaa

SEQ ID NO: 51679 - DNA, 50 bp, synthetic construct
  source 1..50: mol_type = other DNA
aatcatcttgacaaactcgttcccgagggctatactttagtaggacgata

SEQ ID NO: 51680 - DNA, 50 bp, synthetic construct
  source 1..50: mol_type = other DNA
gagacgggtttgtcttttctaaatggagggaacgacgacctaccgcaaat

SEQ ID NO: 51681 - DNA, 50 bp, synthetic construct
  source 1..50: mol_type = other DNA
gttaaattcccagttgggtttttctagacttgcccaagtgaaattttata

SEQ ID NO: 51682 - DNA, 50 bp, synthetic construct
  source 1..50: mol_type = other DNA
gcccttatgggcttattttactttatctcctactataattacaaaagtga

SEQ ID NO: 51683 - DNA, 50 bp, synthetic construct
  source 1..50: mol_type = other DNA
cgaataaccaacttgctaccggtaacaccctcaccgcctatgcccgcgat

SEQ ID NO: 51684 - DNA, 50 bp, synthetic construct
  source 1..50: mol_type = other DNA
gtcgccgcggaaatcaaattctttgcctctcgccgcgatgccgaggcccg

SEQ ID NO: 51685 - DNA, 50 bp, synthetic construct
  source 1..50: mol_type = other DNA
ttgtgtgttcttcgccacaatgttgcaagttagcggttatgaacacatat

SEQ ID NO: 51686 - DNA, 50 bp, synthetic construct
  source 1..50: mol_type = other DNA
gaacaatctaatcaacccctgtgaaatccagactatcaattagatgagtc

SEQ ID NO: 51687 - DNA, 50 bp, synthetic construct
  source 1..50: mol_type = other DNA
gctactgtgtttggggaatagacattatcgtattccctgaactttggtaa

SEQ ID NO: 51688 - DNA, 50 bp, synthetic construct
  source 1..50: mol_type = other DNA
tgctgagatagtgcattgaaatgaacagattatgatgtacttataatctg

SEQ ID NO: 51689 - DNA, 50 bp, synthetic construct
  source 1..50: mol_type = other DNA
agttaatacaatatggtccatactaagttttgtaccgtatttaattaatc

SEQ ID NO: 51690 - DNA, 50 bp, synthetic construct
  source 1..50: mol_type = other DNA
gatagtgttggtaaaagagaaaacatgtataaaccattaccaacactata

SEQ ID NO: 51691 - DNA, 50 bp, synthetic construct
  source 1..50: mol_type = other DNA
ccttacttcttgctgataaactctttagcgactctctaacgcaattaaat

SEQ ID NO: 51692 - DNA, 50 bp, synthetic construct
  source 1..50: mol_type = other DNA
cttccagaagctgaaaagtctttcttgcccaagtgcatctacattggaac

SEQ ID NO: 51693 - DNA, 50 bp, synthetic construct
  source 1..50: mol_type = other DNA
gcacccggtggtttggggggtgcgttcgaactccccactcgctaccacac

SEQ ID NO: 51694 - DNA, 50 bp, synthetic construct
  source 1..50: mol_type = other DNA
gataaattaattagccacaacatctcaatataggggctaattaattatcg

SEQ ID NO: 51695 - DNA, 50 bp, synthetic construct
  source 1..50: mol_type = other DNA
gatggaaaggggctcagtgtacagcttagaagacggagcggcttgtgcca

SEQ ID NO: 51696 - DNA, 50 bp, synthetic construct
  source 1..50: mol_type = other DNA
ctaagtattttgatgttttataaaggtttttacaacaggaaaatttcgtt

SEQ ID NO: 51697 - DNA, 50 bp, synthetic construct
  source 1..50: mol_type = other DNA
ttagttattggggtttacaacatttaatatcatgtacccatcaacacacg

SEQ ID NO: 51698 - DNA, 50 bp, synthetic construct
  source 1..50: mol_type = other DNA
aaaaaataatacatcttctcatgaacccatgtacttgtgtattgggtttt

SEQ ID NO: 51699 - DNA, 50 bp, synthetic construct
  source 1..50: mol_type = other DNA
gtattgatcttattaattattaaatacttaaaatgtaatataagcgatat

SEQ ID NO: 51700 - DNA, 50 bp, synthetic construct
  source 1..50: mol_type = other DNA
aaatccgatacatttctgcttattcttataagcattagtatctcattttc

SEQ ID NO: 51701 - DNA, 50 bp, synthetic construct
  source 1..50: mol_type = other DNA
attgctaatgttatttatgttaaaattataacatagtatagtaatattat

SEQ ID NO: 51702 - DNA, 50 bp, synthetic construct
  source 1..50: mol_type = other DNA
taatttcaaattatatattatatttaaataaaaattagaattttaaaaca

SEQ ID NO: 51703 - DNA, 50 bp, synthetic construct
  source 1..50: mol_type = other DNA
taatatatcaactggattaatactaagtatttaatgattttaatctataa

SEQ ID NO: 51704 - DNA, 50 bp, synthetic construct
  source 1..50: mol_type = other DNA
gcgggctggtgtacacgatcaggtgcgactgagcagcaggcccagcccgg

SEQ ID NO: 51705 - DNA, 50 bp, synthetic construct
  source 1..50: mol_type = other DNA
taaatcaaaatgttcccatagtatacaatcaatgggaacatttgaatttt

SEQ ID NO: 51706 - DNA, 50 bp, synthetic construct
  source 1..50: mol_type = other DNA
gatatgagtgttaagacaagaatacttttacatagctaaacacgtacatt

SEQ ID NO: 51707 - DNA, 50 bp, synthetic construct
  source 1..50: mol_type = other DNA
gcgtaaaatctattttttagttttattgctaaaaaaaatagaatgaaccc

SEQ ID NO: 51708 - DNA, 50 bp, synthetic construct
  source 1..50: mol_type = other DNA
actaccgaatttcatattaaatgtttctttttataactcgagctctccca

SEQ ID NO: 51709 - DNA, 50 bp, synthetic construct
  source 1..50: mol_type = other DNA
ataatgtaaaaatggatgtttaaaaattcaaacgttcctttttacgttga

SEQ ID NO: 51710 - DNA, 50 bp, synthetic construct
  source 1..50: mol_type = other DNA
agtttgctattaggtcgcaatacagttgtattgcaaccaataaagattct

SEQ ID NO: 51711 - DNA, 50 bp, synthetic construct
  source 1..50: mol_type = other DNA
cataactatttaaatccacccggaactcgtggtggttttaaactgtaact

SEQ ID NO: 51712 - DNA, 50 bp, synthetic construct
  source 1..50: mol_type = other DNA
aattatataacctagtccttgtctaaagaagcttttgaggtttcatgtaa

SEQ ID NO: 51713 - DNA, 50 bp, synthetic construct
  source 1..50: mol_type = other DNA
aaatatttaagaactcttttataattttatctttatatatttttatattt

SEQ ID NO: 51714 - DNA, 50 bp, synthetic construct
  source 1..50: mol_type = other DNA
tttcgggtcttcgtggcgggccttcgatctcccgcattgaggacaagaac

SEQ ID NO: 51715 - DNA, 50 bp, synthetic construct
  source 1..50: mol_type = other DNA
ccttttcgggttgtgcggctaacggctgtaggcaagctgctctctaaagg

SEQ ID NO: 51716 - DNA, 50 bp, synthetic construct
  source 1..50: mol_type = other DNA
tataaaatttcacttgggcaagtctagaaaaacccaactgggaatttaac

SEQ ID NO: 51717 - DNA, 50 bp, synthetic construct
  source 1..50: mol_type = other DNA
aaccgattttgctcgtttgtcgccttatcgaacaagtttatagtggattt

SEQ ID NO: 51718 - DNA, 50 bp, synthetic construct
  source 1..50: mol_type = other DNA
ttggtggtgaaaacactcaagtcgcaactcttgagtgttttgaatgtaag

SEQ ID NO: 51719 - DNA, 50 bp, synthetic construct
  source 1..50: mol_type = other DNA
tgcctcgtgtttaactgtccaacttttgttggacgatgaaatggaatagc

SEQ ID NO: 51720 - DNA, 50 bp, synthetic construct
  source 1..50: mol_type = other DNA
ttttaggtggtgtatttaaacgtgtcaaggtctaaatacactatgaggat

SEQ ID NO: 51721 - DNA, 50 bp, synthetic construct
  source 1..50: mol_type = other DNA
tcagcacgctgaaccaggagatgacgccatctaacgatggcgcgtctgga

SEQ ID NO: 51722 - DNA, 50 bp, synthetic construct
  source 1..50: mol_type = other DNA
tcgccgtcctggaggcaaccccgccggcgggagaaagtgagagacatgcc

SEQ ID NO: 51723 - DNA, 50 bp, synthetic construct
  source 1..50: mol_type = other DNA
ccgtccggtgggcctgcggggcaggcctgtctctacggctggctggtcgg

SEQ ID NO: 51724 - DNA, 50 bp, synthetic construct
  source 1..50: mol_type = other DNA
ttctgagaattttgatggtgaacgtaatttcattaccaaattaaataact

SEQ ID NO: 51725 - DNA, 50 bp, synthetic construct
  source 1..50: mol_type = other DNA
atgaaggatataactcgtgtaaatatgttggttatttttatattattttt

SEQ ID NO: 51726 - DNA, 50 bp, synthetic construct
  source 1..50: mol_type = other DNA
tatgctagattctaccttttttattaaaattattcaggtaatttaggata

SEQ ID NO: 51727 - DNA, 50 bp, synthetic construct
  source 1..50: mol_type = other DNA
tcgccagtaagtcatctatgttaaccctaacaagcgatactaattggtat

SEQ ID NO: 51728 - DNA, 50 bp, synthetic construct
  source 1..50: mol_type = other DNA
tttctggttaagaccatcatgattgtaatacccttggcgtttaccagacg

SEQ ID NO: 51729 - DNA, 50 bp, synthetic construct
  source 1..50: mol_type = other DNA
acatctaatgctgtcgcaaacgcaatgggatttgagtcatcggctgaaaa

SEQ ID NO: 51730 - DNA, 50 bp, synthetic construct
  source 1..50: mol_type = other DNA
gctaactatgatagtaattctttatttaagatatacatatcacagttagt

SEQ ID NO: 51731 - DNA, 50 bp, synthetic construct
  source 1..50: mol_type = other DNA
tgacgctgaaccaaatcactacaagtatgtagtgatttcaaggcagaact

SEQ ID NO: 51732 - DNA, 50 bp, synthetic construct
  source 1..50: mol_type = other DNA
ggaggagggcaccaccacgacgccgtggggctggtatggcaacagcatgg

SEQ ID NO: 51733 - DNA, 50 bp, synthetic construct
  source 1..50: mol_type = other DNA
cggtatgttcttcattataaagatatctaacgggaatgatacccatatga

SEQ ID NO: 51734 - DNA, 50 bp, synthetic construct
  source 1..50: mol_type = other DNA
agcaaacatcttccctttttagttttaattacaaatgaataaataaccag

SEQ ID NO: 51735 - DNA, 50 bp, synthetic construct
  source 1..50: mol_type = other DNA
aaatcattaagtctgcttatggtaaattcaataattttacaaaatgatga

SEQ ID NO: 51736 - DNA, 50 bp, synthetic construct
  source 1..50: mol_type = other DNA
ggctttcatctttcttcttccccgtagggctggcgagaaaaatgaatgct

SEQ ID NO: 51737 - DNA, 50 bp, synthetic construct
  source 1..50: mol_type = other DNA
actaaaccactagctcttggcaaggctgattaaagtgaatgggatttatt

SEQ ID NO: 51738 - DNA, 50 bp, synthetic construct
  source 1..50: mol_type = other DNA
gaatatagatagcaacacgcatttatatgaacgtgttgaagagggaatat

SEQ ID NO: 51739 - DNA, 50 bp, synthetic construct
  source 1..50: mol_type = other DNA
tctgccttcggagggcagcgctctatcgagcgccgcaaaatgaagggagg

SEQ ID NO: 51740 - DNA, 50 bp, synthetic construct
  source 1..50: mol_type = other DNA
aggtggacgcttaggaattggtattgttaccaaagcgggtaggtgtacca

SEQ ID NO: 51741 - DNA, 50 bp, synthetic construct
  source 1..50: mol_type = other DNA
tctttcacagataatactactactatattgcctattttatcatataaagg

SEQ ID NO: 51742 - DNA, 50 bp, synthetic construct
  source 1..50: mol_type = other DNA
gttttttgttcctatcgccttaccctagcgccgcaatgattacagtaaac

SEQ ID NO: 51743 - DNA, 50 bp, synthetic construct
  source 1..50: mol_type = other DNA
cctttttatgtctcaataagtgccctggcactgtctgttattcaacaatt

SEQ ID NO: 51744 - DNA, 50 bp, synthetic construct
  source 1..50: mol_type = other DNA
ctttatacgtctgatttatggaaagaaaatgatccatttcccgcgaatat

SEQ ID NO: 51745 - DNA, 50 bp, synthetic construct
  source 1..50: mol_type = other DNA
taatttttgtagctattgatataatggtatactaatagcgacaaagatgc

SEQ ID NO: 51746 - DNA, 50 bp, synthetic construct
  source 1..50: mol_type = other DNA
tcgaggcgcgtttcctcaagcttaaagccgctgctataggcgcgcctcgc

SEQ ID NO: 51747 - DNA, 50 bp, synthetic construct
  source 1..50: mol_type = other DNA
ttcccatcgtacacactaggagccatgtgtcccgatatgtgcgaccgaag

SEQ ID NO: 51748 - DNA, 50 bp, synthetic construct
  source 1..50: mol_type = other DNA
tttttatcaaagccttaatataaaatcaacacttatctgattgtcgaaag

SEQ ID NO: 51749 - DNA, 50 bp, synthetic construct
  source 1..50: mol_type = other DNA
accttggatttttaggtcaaagatatttcattgttttaaaaatccataaa

SEQ ID NO: 51750 - DNA, 50 bp, synthetic construct
  source 1..50: mol_type = other DNA
acatctaaccacctgattatgcacaagttcttctgcgtttgtattgattc

SEQ ID NO: 51751 - DNA, 50 bp, synthetic construct
  source 1..50: mol_type = other DNA
tggtgggatataatttttgtttaattttttacacgaatcagatccacgga

SEQ ID NO: 51752 - DNA, 50 bp, synthetic construct
  source 1..50: mol_type = other DNA
aatgaagatgattaagattttaggttgatatcgactgcttcatctcgagt

SEQ ID NO: 51753 - DNA, 50 bp, synthetic construct
  source 1..50: mol_type = other DNA
tttggcggcacgttcgacaccccggagggggtggcgggggtggtgcggcg

SEQ ID NO: 51754 - DNA, 50 bp, synthetic construct
  source 1..50: mol_type = other DNA
gagcgccgctcgaagccctctcctcccgggcgaacgccgccgcggcgctc

SEQ ID NO: 51755 - DNA, 50 bp, synthetic construct
  source 1..50: mol_type = other DNA
ctgggagcatgatttttacgacccggaagtatgaaaaagatatagagaaa

SEQ ID NO: 51756 - DNA, 50 bp, synthetic construct
  source 1..50: mol_type = other DNA
caatgaggctgtacagatactctgccggaaagatcaccgcgttgaaatcc

SEQ ID NO: 51757 - DNA, 50 bp, synthetic construct
  source 1..50: mol_type = other DNA
cgcgattttcgttacttttttcaagggaaggcgaagacaatctgatcggc

SEQ ID NO: 51758 - DNA, 50 bp, synthetic construct
  source 1..50: mol_type = other DNA
ggctaccgaatatgctctttgtattaagaaaaagcgcacgttcggctacc

SEQ ID NO: 51759 - DNA, 50 bp, synthetic construct
  source 1..50: mol_type = other DNA
accctaatgctttcccccaaaaaactgctttccggccatccttttactcg

SEQ ID NO: 51760 - DNA, 50 bp, synthetic construct
  source 1..50: mol_type = other DNA
acgataggggctaggtgattaaagatctgccaatgaccagaaaacattga

SEQ ID NO: 51761 - DNA, 50 bp, synthetic construct
  source 1..50: mol_type = other DNA
tgagcgatgagttcttgtagacgtccgaatctaatataatagatatactg

SEQ ID NO: 51762 - DNA, 50 bp, synthetic construct
  source 1..50: mol_type = other DNA
gcataagctgctatttttaccatcattattatattacaattctcttgaga

SEQ ID NO: 51763 - DNA, 50 bp, synthetic construct
  source 1..50: mol_type = other DNA
aaaccgaatagactttattcaatggtcattgtattgtagctattcggcat

SEQ ID NO: 51764 - DNA, 50 bp, synthetic construct
  source 1..50: mol_type = other DNA
gaagctcaccgttctttgactcccctaggagtgaattaattttgattgta

SEQ ID NO: 51765 - DNA, 50 bp, synthetic construct
  source 1..50: mol_type = other DNA
ccccttcttggcgagcgcttgagaatctgcaccccggcgagggcaaggca

SEQ ID NO: 51766 - DNA, 50 bp, synthetic construct
  source 1..50: mol_type = other DNA
ttgaaccgctcgggtcagcggcagcgatgccgctgatcgcggcggtggcg

SEQ ID NO: 51767 - DNA, 50 bp, synthetic construct
  source 1..50: mol_type = other DNA
aaccgataacctcatgagggcaatgaaataccctcatgaggttatcggta

SEQ ID NO: 51768 - DNA, 50 bp, synthetic construct
  source 1..50: mol_type = other DNA
atcctgctgttttttcattactaatacccgcttcaaaaaacatttgcaaa

SEQ ID NO: 51769 - DNA, 50 bp, synthetic construct
  source 1..50: mol_type = other DNA
ccataaatacccttatttaaataatactttttattgctctaaatttattt

SEQ ID NO: 51770 - DNA, 50 bp, synthetic construct
  source 1..50: mol_type = other DNA
tttttgtaattctttatccaactcgggaaatagtgaaagagataataaaa

SEQ ID NO: 51771 - DNA, 50 bp, synthetic construct
  source 1..50: mol_type = other DNA
gggaatcctctctaggctgtttttgtttagacagtgaatgaatcatttag

SEQ ID NO: 51772 - DNA, 50 bp, synthetic construct
  source 1..50: mol_type = other DNA
acccgatcgtcctggcgcacggccgcggcgatcggcaccagcgatcggat

SEQ ID NO: 51773 - DNA, 50 bp, synthetic construct
  source 1..50: mol_type = other DNA
ttttgggttaataaaacatttactagaggaaatggaccattaacctaaaa

SEQ ID NO: 51774 - DNA, 50 bp, synthetic construct
  source 1..50: mol_type = other DNA
tcaccatctttactagttataattactattccgttcagaaaagatgctcc

SEQ ID NO: 51775 - DNA, 50 bp, synthetic construct
  source 1..50: mol_type = other DNA
tttgatgtagttaggttgtgtttaatcaaatgattgactcatacatttgt

SEQ ID NO: 51776 - DNA, 50 bp, synthetic construct
  source 1..50: mol_type = other DNA
aactccaatatgaatatttcataaaagtaggaaatatcgatattgtcatt

SEQ ID NO: 51777 - DNA, 50 bp, synthetic construct
  source 1..50: mol_type = other DNA
agatataaattataaagatatttatatggctacatacttagtgtgtagcc

SEQ ID NO: 51778 - DNA, 50 bp, synthetic construct
  source 1..50: mol_type = other DNA
cggcgggcggtggaacggggcatggcaggccgccgccggcccgccgtccg

SEQ ID NO: 51779 - DNA, 50 bp, synthetic construct
  source 1..50: mol_type = other DNA
agtaaacatagaaattctccttcttccaaaggctgtcacctttgcctacc

SEQ ID NO: 51780 - DNA, 50 bp, synthetic construct
  source 1..50: mol_type = other DNA
ccttactatcaattttttataataattattattataattgatattaaaat

SEQ ID NO: 51781 - DNA, 50 bp, synthetic construct
  source 1..50: mol_type = other DNA
aactgtcttttcactgataaaaagttctttttattgctctaaatttattt

SEQ ID NO: 51782 - DNA, 50 bp, synthetic construct
  source 1..50: mol_type = other DNA
tattgccgaattaaatattgtaaaattttcccacagaaaatttaataata

SEQ ID NO: 51783 - DNA, 50 bp, synthetic construct
  source 1..50: mol_type = other DNA
agtaagaggacagtttcaagtttttgttctttttttactctcagcttcct

SEQ ID NO: 51784 - DNA, 50 bp, synthetic construct
  source 1..50: mol_type = other DNA
tcacattacagagtggtattctataaatagaacactattaatcaagtatg

SEQ ID NO: 51785 - DNA, 50 bp, synthetic construct
  source 1..50: mol_type = other DNA
tgttatcaccctgttggcgtcaacctaattacaccaacaaggtgacgaca

SEQ ID NO: 51786 - DNA, 50 bp, synthetic construct
  source 1..50: mol_type = other DNA
gtgcccgaaggcccttgtcgattccggcggccgcgcaggccttcgcccag

SEQ ID NO: 51787 - DNA, 50 bp, synthetic construct
  source 1..50: mol_type = other DNA
agccaagctaaagaaatcttttaattttaaaagattgttctgttttatta

SEQ ID NO: 51788 - DNA, 50 bp, synthetic construct
  source 1..50: mol_type = other DNA
gcgggtacacgctcaagttcagaccagctggaaccgcgccgggtaccgag

SEQ ID NO: 51789 - DNA, 50 bp, synthetic construct
  source 1..50: mol_type = other DNA
cttttcttaaaggtaatcttaattcagtcaaaggcggaaggatagatggc

SEQ ID NO: 51790 - DNA, 50 bp, synthetic construct
  source 1..50: mol_type = other DNA
ttaattctgttttttgatgtgttttaaaaataggtctggaaattttttag

SEQ ID NO: 51791 - DNA, 50 bp, synthetic construct
  source 1..50: mol_type = other DNA
cttttcagtgattaactcttttccaaaccacagagtagatcattgaaaag

SEQ ID NO: 51792 - DNA, 50 bp, synthetic construct
  source 1..50: mol_type = other DNA
ctaaaacgcgctgtatgcgattttaacaaatagcatcagagatttttacc

SEQ ID NO: 51793 - DNA, 50 bp, synthetic construct
  source 1..50: mol_type = other DNA
gaagaattagaactggttggttaatactagacaaggttttcaacacgcta

SEQ ID NO: 51794 - DNA, 50 bp, synthetic construct
  source 1..50: mol_type = other DNA
gcttacaattgaaaattcttcagcaatctgcgtgagttgttccaataatg

SEQ ID NO: 51795 - DNA, 50 bp, synthetic construct
  source 1..50: mol_type = other DNA
ggtcacctgaccgtcggtgacgtcgtaaagcaggcgacggcacagatgcc

SEQ ID NO: 51796 - DNA, 50 bp, synthetic construct
  source 1..50: mol_type = other DNA
ggctcaccttcgcgccctccgccttgagaaggaggcattgcccatgaccg

SEQ ID NO: 51797 - DNA, 50 bp, synthetic construct
  source 1..50: mol_type = other DNA
tcttgcaatgcgaaccttatcaacggattcgtaatgctctcgtctacaga

SEQ ID NO: 51798 - DNA, 50 bp, synthetic construct
  source 1..50: mol_type = other DNA
attgtccacaatatcttcaatgtcggaaaataaaagatcgaaaaatgacg

SEQ ID NO: 51799 - DNA, 50 bp, synthetic construct
  source 1..50: mol_type = other DNA
ttcatacaacagtatgaaccagctattgatggtaaattctatttttatac

SEQ ID NO: 51800 - DNA, 50 bp, synthetic construct
  source 1..50: mol_type = other DNA
catgaactcaaagggcagaattatcttcaattttcttgacggtcttcatg

SEQ ID NO: 51801 - DNA, 50 bp, synthetic construct
  source 1..50: mol_type = other DNA
catttttatacgtgcaaagatcaacatctggaggaagactaatgaaaata

SEQ ID NO: 51802 - DNA, 50 bp, synthetic construct
  source 1..50: mol_type = other DNA
ataaaaacaaattggatcaacgtattggagctgaaatgctctctttttat

SEQ ID NO: 51803 - DNA, 50 bp, synthetic construct
  source 1..50: mol_type = other DNA
gtcaggggaaaaagagacaaaaaaaattcgtactctcgattggttttgat

SEQ ID NO: 51804 - DNA, 50 bp, synthetic construct
  source 1..50: mol_type = other DNA
cttaagtcaacaatggtttcttgatcccaagaaactgcagtaggatgaat

SEQ ID NO: 51805 - DNA, 50 bp, synthetic construct
  source 1..50: mol_type = other DNA
gttttgagagttttactatgaggccgggtacaaagtaaaacataccgcat

SEQ ID NO: 51806 - DNA, 50 bp, synthetic construct
  source 1..50: mol_type = other DNA
ctcccttcttaattaatttatattttcaattacatcctccgggatttgag

SEQ ID NO: 51807 - DNA, 50 bp, synthetic construct
  source 1..50: mol_type = other DNA
gtgttttttagttctacattttcaattcctcatttatatataataaatca

SEQ ID NO: 51808 - DNA, 50 bp, synthetic construct
  source 1..50: mol_type = other DNA
ttcgggtccaacataatatcatctccttagttttatatgtgtttatttat

SEQ ID NO: 51809 - DNA, 50 bp, synthetic construct
  source 1..50: mol_type = other DNA
gtgtgtctccaagctcctgagaagccctgtaacagcgcttggtgaaaccg

SEQ ID NO: 51810 - DNA, 50 bp, synthetic construct
  source 1..50: mol_type = other DNA
tccctggacgagacccccgagttcaggacgccgggcacctcgaccagttc

SEQ ID NO: 51811 - DNA, 50 bp, synthetic construct
  source 1..50: mol_type = other DNA
gcgccgtgtggctggatacgcccgcgtcttgatacccaagtattcggcag

SEQ ID NO: 51812 - DNA, 50 bp, synthetic construct
  source 1..50: mol_type = other DNA
cggttatcgccaacggacgcgagatgaggagcgtcgccggaaaatgagcg

SEQ ID NO: 51813 - DNA, 50 bp, synthetic construct
  source 1..50: mol_type = other DNA
agccttaccaatacgaaaattaggaatgtaaattaaaaaaatgtaaaaat

SEQ ID NO: 51814 - DNA, 50 bp, synthetic construct
  source 1..50: mol_type = other DNA
tactgcatggatcacagcagctgtcagcagctccgtttcttttttaagaa

SEQ ID NO: 51815 - DNA, 50 bp, synthetic construct
  source 1..50: mol_type = other DNA
acagttatgactaggagtctttatgctggttttgtgatagccatgattgc

SEQ ID NO: 51816 - DNA, 50 bp, synthetic construct
  source 1..50: mol_type = other DNA
aactaaacacttaattggtgttaccctcaccaccgaacatatgtttttat

SEQ ID NO: 51817 - DNA, 50 bp, synthetic construct
  source 1..50: mol_type = other DNA
gtaaaaaacgggcgagtcgtcgcccgtacgacgagcggcatgtgtttttt

SEQ ID NO: 51818 - DNA, 50 bp, synthetic construct
  source 1..50: mol_type = other DNA
agctggtcttttgtgacggtgatacaagccaccgaaaatgacgacgagca

SEQ ID NO: 51819 - DNA, 50 bp, synthetic construct
  source 1..50: mol_type = other DNA
tccagtcaaaaccgataattttcgccttaaccagatctgattggacctgg

SEQ ID NO: 51820 - DNA, 50 bp, synthetic construct
  source 1..50: mol_type = other DNA
tagcatcatctttgggaaatcctaactttatttttttaatctgttcttcc

SEQ ID NO: 51821 - DNA, 50 bp, synthetic construct
  source 1..50: mol_type = other DNA
aaaagaagtttaatagataatttttaaaagaagctatatcaattgattta

SEQ ID NO: 51822 - DNA, 50 bp, synthetic construct
  source 1..50: mol_type = other DNA
gctaaattaaagaaatcttctaattcattttcagatttttttactttagt

SEQ ID NO: 51823 - DNA, 50 bp, synthetic construct
  source 1..50: mol_type = other DNA
attcaattaaatgctgatatgaccatgtcaatataatatttttgttgttc

SEQ ID NO: 51824 - DNA, 50 bp, synthetic construct
  source 1..50: mol_type = other DNA
ctattcttgttattcaagttgaagatcttcaattctatatccaaagggtg

SEQ ID NO: 51825 - DNA, 50 bp, synthetic construct
  source 1..50: mol_type = other DNA
agcgtagatagccgcgtgcataccgccgtgtcggcgcggccgtcttcgtc

SEQ ID NO: 51826 - DNA, 50 bp, synthetic construct
  source 1..50: mol_type = other DNA
acgtacatttgatgaattgaaagagagcgattcatatggcagatgttcag

SEQ ID NO: 51827 - DNA, 50 bp, synthetic construct
  source 1..50: mol_type = other DNA
tattcaccgtccgtcttcgaagaggaaggccttaccacggacaccatcat

SEQ ID NO: 51828 - DNA, 50 bp, synthetic construct
  source 1..50: mol_type = other DNA
tagctcttgagccagttcgtcagcaaggtgacgacaaagcataaacgctt

SEQ ID NO: 51829 - DNA, 50 bp, synthetic construct
  source 1..50: mol_type = other DNA
tacaagatcgggtaaattattcttaaaagaatgcttttaccattcttttt

SEQ ID NO: 51830 - DNA, 50 bp, synthetic construct
  source 1..50: mol_type = other DNA
atagatttgaagaatagtagttttattataaaccgagaagacaaatagtc

SEQ ID NO: 51831 - DNA, 50 bp, synthetic construct
  source 1..50: mol_type = other DNA
gtttcgtatatagatatccaatttataaaactacaatcaatatataaaca

SEQ ID NO: 51832 - DNA, 50 bp, synthetic construct
  source 1..50: mol_type = other DNA
ctgttgtagatgatatagcagcagaacaggaataaataagaatacaaagg

SEQ ID NO: 51833 - DNA, 50 bp, synthetic construct
  source 1..50: mol_type = other DNA
gtggaagaatgtataacttttcttgcaattatgcttatagctataaaaga

SEQ ID NO: 51834 - DNA, 50 bp, synthetic construct
  source 1..50: mol_type = other DNA
tatatggataaccaaacctataattcatttcaatttttaacgtctatact

SEQ ID NO: 51835 - DNA, 50 bp, synthetic construct
  source 1..50: mol_type = other DNA
aacccgtaaggctcctgttattgatttcatccacaacagccttaccgttt

SEQ ID NO: 51836 - DNA, 50 bp, synthetic construct
  source 1..50: mol_type = other DNA
accaagagacattgtaatttcatctaaaacaaattagaatgtctcttgaa

SEQ ID NO: 51837 - DNA, 50 bp, synthetic construct
  source 1..50: mol_type = other DNA
tcgaatcgttttcaccagataagggccgtcggctgcggaagccgagcgcg

SEQ ID NO: 51838 - DNA, 50 bp, synthetic construct
  source 1..50: mol_type = other DNA
aggagttctttgaaatattcaatacttatgaaacgttttaacgaaccatc

SEQ ID NO: 51839 - DNA, 50 bp, synthetic construct
  source 1..50: mol_type = other DNA
tgcgaatcaagaagtaaggtccgaaatataggcatacaccttgttaagaa

SEQ ID NO: 51840 - DNA, 50 bp, synthetic construct
  source 1..50: mol_type = other DNA
gtttgcgtacattctatgtgctgtcgtcagatcatagcgaaggccgaggc

SEQ ID NO: 51841 - DNA, 50 bp, synthetic construct
  source 1..50: mol_type = other DNA
tttgaagaataatatagtttgtcatataacaaactattacctataaaaaa

SEQ ID NO: 51842 - DNA, 50 bp, synthetic construct
  source 1..50: mol_type = other DNA
ttgaggggtttcatccaatcatttcaaataagatggagaaactacctaat

SEQ ID NO: 51843 - DNA, 50 bp, synthetic construct
  source 1..50: mol_type = other DNA
aaaagtcgcatgtgcaaatacttatatgagtaattataactagtaaagat

SEQ ID NO: 51844 - DNA, 50 bp, synthetic construct
  source 1..50: mol_type = other DNA
ataatcccgtttttctaatatcattaatacaattgtatagaggtgattta

SEQ ID NO: 51845 - DNA, 50 bp, synthetic construct
  source 1..50: mol_type = other DNA
aggttatcctataataagtacctatttatttacttttcgtataataaact

SEQ ID NO: 51846 - DNA, 50 bp, synthetic construct
  source 1..50: mol_type = other DNA
atttaagttatccattattagtaccttctttactatcttgacttttaata

SEQ ID NO: 51847 - DNA, 50 bp, synthetic construct
  source 1..50: mol_type = other DNA
gggagtattgtcaatgttcttgacgagggtaggaaatcaagaatactccc

SEQ ID NO: 51848 - DNA, 50 bp, synthetic construct
  source 1..50: mol_type = other DNA
cgattccgccgtccggctcacccaccggtgtgggccgtacacgcgcgcac

SEQ ID NO: 51849 - DNA, 50 bp, synthetic construct
  source 1..50: mol_type = other DNA
agcctcctcccgggcccgtgcagctcactgcgcgggccagccgcctggaa

SEQ ID NO: 51850 - DNA, 50 bp, synthetic construct
  source 1..50: mol_type = other DNA
aacattatttaatacaattaaattataatttataccgcttcctattcgta

SEQ ID NO: 51851 - DNA, 50 bp, synthetic construct
  source 1..50: mol_type = other DNA
cattgtgaagaaataaatatgataatttctgttttaatttctttctttaa

SEQ ID NO: 51852 - DNA, 50 bp, synthetic construct
  source 1..50: mol_type = other DNA
tgtcgtcaccttgttggtgtaattaggttgacgccaacaaggtgacgaca

SEQ ID NO: 51853 - DNA, 50 bp, synthetic construct
  source 1..50: mol_type = other DNA
gtattaatgcttatgcaagagcagtactgctctattcggctttttaaata

SEQ ID NO: 51854 - DNA, 50 bp, synthetic construct
  source 1..50: mol_type = other DNA
cttgatagtttaaaaatggatgcttaaggattttctagataaatataatt

SEQ ID NO: 51855 - DNA, 50 bp, synthetic construct
  source 1..50: mol_type = other DNA
tggagagatctttattcgcggaataaaaagaatgaactatgatagtagaa

SEQ ID NO: 51856 - DNA, 50 bp, synthetic construct
  source 1..50: mol_type = other DNA
ggcttgttcctgctctttgagccccggacgacggggggcgggaataccaa

SEQ ID NO: 51857 - DNA, 50 bp, synthetic construct
  source 1..50: mol_type = other DNA
aggtggacgcttaggaattggtattgttgccaaagcgggtaggtgtacca

SEQ ID NO: 51858 - DNA, 50 bp, synthetic construct
  source 1..50: mol_type = other DNA
atgtggctgatactatcgttacagcctagagaggattcccctaggctgac

SEQ ID NO: 51859 - DNA, 50 bp, synthetic construct
  source 1..50: mol_type = other DNA
tgttccctcatacagcaaaatcacgcttctttttcgtctataaccgcttt

SEQ ID NO: 51860 - DNA, 50 bp, synthetic construct
  source 1..50: mol_type = other DNA
taataccgattacgccgataatttttatatagattgcatattcggtataa

SEQ ID NO: 51861 - DNA, 50 bp, synthetic construct
  source 1..50: mol_type = other DNA
actttctaaattcggcatataacgcgggaagttcaccgcatccagaattt

SEQ ID NO: 51862 - DNA, 50 bp, synthetic construct
  source 1..50: mol_type = other DNA
agccgcctgtccagcagggtcccggccaggacctgccaggacgggcaaac

SEQ ID NO: 51863 - DNA, 50 bp, synthetic construct
  source 1..50: mol_type = other DNA
tggcggaacagggccagcaggccgaatgtttgcgcgaagctgttcggcca

SEQ ID NO: 51864 - DNA, 50 bp, synthetic construct
  source 1..50: mol_type = other DNA
ccagaacgtcgatcatggaatagaggaggccgccatgagtgacgtgatgc

SEQ ID NO: 51865 - DNA, 50 bp, synthetic construct
  source 1..50: mol_type = other DNA
tgggcgtatcagggtaaatttattttgataaattctgagttatacgggaa

SEQ ID NO: 51866 - DNA, 50 bp, synthetic construct
  source 1..50: mol_type = other DNA
tctggatgagattggttactcgttgggactggtagcagattacatcacag

SEQ ID NO: 51867 - DNA, 50 bp, synthetic construct
  source 1..50: mol_type = other DNA
ccttacttcttgctgataaactctttagacactctctaacgcaattaaat

SEQ ID NO: 51868 - DNA, 50 bp, synthetic construct
  source 1..50: mol_type = other DNA
tcgtggttaaaaatagaaaatacaattgtatttaattagtacaaccagaa

SEQ ID NO: 51869 - DNA, 50 bp, synthetic construct
  source 1..50: mol_type = other DNA
gctcaccgcgcggcgcagcagcgcctgcgggcccatcagcagcagcgagc

SEQ ID NO: 51870 - DNA, 50 bp, synthetic construct
  source 1..50: mol_type = other DNA
tattttttcttttgacatagcattaaattgaaatcaaaaaacaaaaacag

SEQ ID NO: 51871 - DNA, 50 bp, synthetic construct
  source 1..50: mol_type = other DNA
aattgcggaggaaaatacaaatgcaattatttatattttccaattgataa

SEQ ID NO: 51872 - DNA, 50 bp, synthetic construct
  source 1..50: mol_type = other DNA
aaatacctcgacgaagtgtttggtgatagatacaaaggtttgaaggagta

SEQ ID NO: 51873 - DNA, 50 bp, synthetic construct
  source 1..50: mol_type = other DNA
tttacccttaatttgaagtttaattattttaacagaaaatgaggtataaa

SEQ ID NO: 51874 - DNA, 50 bp, synthetic construct
  source 1..50: mol_type = other DNA
aagagaaagaggactttaagtgcatatgtacatcgaggaaaggatatacc

SEQ ID NO: 51875 - DNA, 50 bp, synthetic construct
  source 1..50: mol_type = other DNA
atgggttacttagaaaacacttgctcccaacaatttcatatgtaaccctt

SEQ ID NO: 51876 - DNA, 50 bp, synthetic construct
  source 1..50: mol_type = other DNA
aagcatttcgtaataaagaagagtatactcttcctgcttttgcaatgctg

SEQ ID NO: 51877 - DNA, 50 bp, synthetic construct
  source 1..50: mol_type = other DNA
accacaggatgtacaaaatcctgccacatctatttcaagcatccatttgt

SEQ ID NO: 51878 - DNA, 50 bp, synthetic construct
  source 1..50: mol_type = other DNA
ttataaggaacgagttttgattcttttctatttttactcggtggatatta

SEQ ID NO: 51879 - DNA, 50 bp, synthetic construct
  source 1..50: mol_type = other DNA
tgtaagtatagagtatataaaagggattatatgactactctatgattttt

SEQ ID NO: 51880 - DNA, 50 bp, synthetic construct
  source 1..50: mol_type = other DNA
tccgtgaccaccgagatgacaacggtgaacgcccactccatcggcacctg

SEQ ID NO: 51881 - DNA, 50 bp, synthetic construct
  source 1..50: mol_type = other DNA
gagccgccgtgtcgcccatatttgatcatcgccggctcgatcgccggcgc

SEQ ID NO: 51882 - DNA, 50 bp, synthetic construct
  source 1..50: mol_type = other DNA
caaactaattttccttttactacaacagtagtaaaataaaatacaatttg

SEQ ID NO: 51883 - DNA, 50 bp, synthetic construct
  source 1..50: mol_type = other DNA
gtttgttgttaagaataatcatgattatcaatacgatcataaccaaaagg

SEQ ID NO: 51884 - DNA, 50 bp, synthetic construct
  source 1..50: mol_type = other DNA
attgaccataccatggcgtttggaataagaaactgcatttaataataaaa

SEQ ID NO: 51885 - DNA, 50 bp, synthetic construct
  source 1..50: mol_type = other DNA
ttttttatagtggaattaactagttaactagtgattacagttatagaaac

SEQ ID NO: 51886 - DNA, 50 bp, synthetic construct
  source 1..50: mol_type = other DNA
gaaatgtagtcttcactatctacaattataactagtaaagatggtgattt

SEQ ID NO: 51887 - DNA, 50 bp, synthetic construct
  source 1..50: mol_type = other DNA
attataatagaagaaattaaaatggaacgcttatatgtcgccatcttgag

SEQ ID NO: 51888 - DNA, 50 bp, synthetic construct
  source 1..50: mol_type = other DNA
atcctcaaaaaaataataaaagaaatttcttcacaatgtttgtttttcat

SEQ ID NO: 51889 - DNA, 50 bp, synthetic construct
  source 1..50: mol_type = other DNA
ttcaatgaagctattccatcgtccttcattatatcaatagctacaaaaat

SEQ ID NO: 51890 - DNA, 50 bp, synthetic construct
  source 1..50: mol_type = other DNA
cataaaaggatgtttaaaaataatatttagtttttatacacattttcacc

SEQ ID NO: 51891 - DNA, 50 bp, synthetic construct
  source 1..50: mol_type = other DNA
aaatggattccacatattcaaatgcccatttaaatttgttctaataatta

SEQ ID NO: 51892 - DNA, 50 bp, synthetic construct
  source 1..50: mol_type = other DNA
tctatcccgtggcaggctttaaaaggatataaagcgtctaagagcataga

SEQ ID NO: 51893 - DNA, 50 bp, synthetic construct
  source 1..50: mol_type = other DNA
ggacaccaaaaggacaggataatactttcttattcatgcttttttggctc

SEQ ID NO: 51894 - DNA, 50 bp, synthetic construct
  source 1..50: mol_type = other DNA
tttgttttcgtacttgttaatgaaattgctgtcgcaagcgcgaaaacagt

SEQ ID NO: 51895 - DNA, 50 bp, synthetic construct
  source 1..50: mol_type = other DNA
aaatgtattggcgttaccttcattataatcccggatttcccggttgattt

SEQ ID NO: 51896 - DNA, 50 bp, synthetic construct
  source 1..50: mol_type = other DNA
gaggcagatcgcagtgaacttctccgcagatcttcgatacaatctttatc

SEQ ID NO: 51897 - DNA, 50 bp, synthetic construct
  source 1..50: mol_type = other DNA
aaatcggattgatatttttaactaagtaaagaaatctgagaacccgcata

SEQ ID NO: 51898 - DNA, 50 bp, synthetic construct
  source 1..50: mol_type = other DNA
tggcaattatatcataagtctgccgccgatcacgttgaccatattggcaa

SEQ ID NO: 51899 - DNA, 50 bp, synthetic construct
  source 1..50: mol_type = other DNA
atataccactcacatggtcagggcctcccggcggcgttggagtggaggga

SEQ ID NO: 51900 - DNA, 50 bp, synthetic construct
  source 1..50: mol_type = other DNA
atcgcggatattcagatagccccaggatgagatgaagcaatctgcgcggg

SEQ ID NO: 51901 - DNA, 50 bp, synthetic construct
  source 1..50: mol_type = other DNA
gtcaggtaggcggcgatgtcacaaaagacctacaccgccgattttctgac

SEQ ID NO: 51902 - DNA, 50 bp, synthetic construct
  source 1..50: mol_type = other DNA
tgaaaagagagagaagagaggaggaggttcctctctgtcagagcatttca

SEQ ID NO: 51903 - DNA, 50 bp, synthetic construct
  source 1..50: mol_type = other DNA
aacgtgattcccatgaccgtaccggcgcgggaacttaacaaggacacccc

SEQ ID NO: 51904 - DNA, 50 bp, synthetic construct
  source 1..50: mol_type = other DNA
aggaatgcagcgaaaatgccgaactgataacgcattatcgcagaatatca

SEQ ID NO: 51905 - DNA, 50 bp, synthetic construct
  source 1..50: mol_type = other DNA
gggcggcgcagcgattgcgggcggcgccgtgcgcagcttttgcagcgctt

SEQ ID NO: 51906 - DNA, 50 bp, synthetic construct
  source 1..50: mol_type = other DNA
ggcagctcattacccaatctccagagttggtataatagtccacctgggcg

SEQ ID NO: 51907 - DNA, 50 bp, synthetic construct
  source 1..50: mol_type = other DNA
agtaaaaagaaaaaaagatttaaatattaaatccttattttctgtcacag

SEQ ID NO: 51908 - DNA, 50 bp, synthetic construct
  source 1..50: mol_type = other DNA
atatgaatataatggatcctgtaatatcacaccttccatttaatcttgat

SEQ ID NO: 51909 - DNA, 50 bp, synthetic construct
  source 1..50: mol_type = other DNA
ccctgcagtaagcagccaccttaagtggaagaaatctgcaccatgcagac

SEQ ID NO: 51910 - DNA, 50 bp, synthetic construct
  source 1..50: mol_type = other DNA
attccgttccagacagaagacgccgtgtagtattccacctgtgcctcaaa

SEQ ID NO: 51911 - DNA, 50 bp, synthetic construct
  source 1..50: mol_type = other DNA
gggtggatccagcacgatcacatccgcgcctgccgctgctgtcacagacc

SEQ ID NO: 51912 - DNA, 50 bp, synthetic construct
  source 1..50: mol_type = other DNA
gaagaacaacccggcgctgcgggacatcccgcattgccaggatctttccc

SEQ ID NO: 51913 - DNA, 50 bp, synthetic construct
  source 1..50: mol_type = other DNA
aaatataagggagatgttctttttggtaaaagaaatggaggtagtttatg

SEQ ID NO: 51914 - DNA, 50 bp, synthetic construct
  source 1..50: mol_type = other DNA
tcaacacttattttcgtttttcttgacagaaaaacgaaatttttgctgtg

SEQ ID NO: 51915 - DNA, 50 bp, synthetic construct
  source 1..50: mol_type = other DNA
atatcaggcaaaaggcaaacgttaaatttttttacccttttccctgaaca

SEQ ID NO: 51916 - DNA, 50 bp, synthetic construct
  source 1..50: mol_type = other DNA
aaggcgttggcacgccgcgcgctgcgcgcttggcctcctgctccttttcg

SEQ ID NO: 51917 - DNA, 50 bp, synthetic construct
  source 1..50: mol_type = other DNA
aacgcctccttgttttctctttctatagagaggggaatcaagcatgcgtg

SEQ ID NO: 51918 - DNA, 50 bp, synthetic construct
  source 1..50: mol_type = other DNA
ttgctatctgtttattggtttggggtaacaaaggaaaaaacagtctgtgg

SEQ ID NO: 51919 - DNA, 50 bp, synthetic construct
  source 1..50: mol_type = other DNA
ataggacgagaagaaaaaggaaatttctttcctttttgatcagtgaatat

SEQ ID NO: 51920 - DNA, 50 bp, synthetic construct
  source 1..50: mol_type = other DNA
aatttattacactacctttctaatgactttaactttttaatttataaata

SEQ ID NO: 51921 - DNA, 50 bp, synthetic construct
  source 1..50: mol_type = other DNA
acatcccaatgtttcataaaataatatttttagataaaacatttttatgc

SEQ ID NO: 51922 - DNA, 50 bp, synthetic construct
  source 1..50: mol_type = other DNA
atatcataatttttaagtgcacctataatagcggcaaaaatttttgttta

SEQ ID NO: 51923 - DNA, 50 bp, synthetic construct
  source 1..50: mol_type = other DNA
agaagcttttacggtcatcattaagcttaataatgctggtacaggtagta

SEQ ID NO: 51924 - DNA, 50 bp, synthetic construct
  source 1..50: mol_type = other DNA
tctcttttttctgtatttgaagatttataggtgaatactaatgaagtgcg

SEQ ID NO: 51925 - DNA, 50 bp, synthetic construct
  source 1..50: mol_type = other DNA
ttcaaattaaattcctttcagaaattaggttgtgtttattttaatttgaa

SEQ ID NO: 51926 - DNA, 50 bp, synthetic construct
  source 1..50: mol_type = other DNA
gcaaaggactgaaaaatctggttatcggattaccgcgtgcagtccgacca

SEQ ID NO: 51927 - DNA, 50 bp, synthetic construct
  source 1..50: mol_type = other DNA
tgcggatgagggaatcacaggcaccagagcgctgcatttactgtgtagat

SEQ ID NO: 51928 - DNA, 50 bp, synthetic construct
  source 1..50: mol_type = other DNA
aatcaaactatgaaaacctgtttgatcaattttgctatcgtagttccccc

SEQ ID NO: 51929 - DNA, 50 bp, synthetic construct
  source 1..50: mol_type = other DNA
tacaagctatctaagctaacgacacccctcgtctgcatagatgtccacta

SEQ ID NO: 51930 - DNA, 50 bp, synthetic construct
  source 1..50: mol_type = other DNA
tagaaaatcatcctgataaatataatatatggaagcagattaaataaaat

SEQ ID NO: 51931 - DNA, 50 bp, synthetic construct
  source 1..50: mol_type = other DNA
atcccctaaaaaaaatcaaaaaagagtttttatgattcaattaaagaatt

SEQ ID NO: 51932 - DNA, 50 bp, synthetic construct
  source 1..50: mol_type = other DNA
gcggcaaacatgccagaaaaaacaattgtctttttaaataaaacttaaac

SEQ ID NO: 51933 - DNA, 50 bp, synthetic construct
  source 1..50: mol_type = other DNA
aatcgtcaatctgaagcttacaggttatggcaagcccaagccaatacatg

SEQ ID NO: 51934 - DNA, 50 bp, synthetic construct
  source 1..50: mol_type = other DNA
ttattgaaaaataacgtgcgcaatttattgcgcatctaaaaattaagtat

SEQ ID NO: 51935 - DNA, 50 bp, synthetic construct
  source 1..50: mol_type = other DNA
gaggcaagcggacacggcccgcttgcgctgccgcaggatccgctgattgt

SEQ ID NO: 51936 - DNA, 50 bp, synthetic construct
  source 1..50: mol_type = other DNA
ggactttcaggcggtaagggttcacgtgatgcaaaactaactggaaagaa

SEQ ID NO: 51937 - DNA, 50 bp, synthetic construct
  source 1..50: mol_type = other DNA
cttttttatttcttcttctttatcttgataaagaacaagaaaatatatat

SEQ ID NO: 51938 - DNA, 50 bp, synthetic construct
  source 1..50: mol_type = other DNA
caacaactcttctatcataaaattaatactttatacagaaagtgatgaga

SEQ ID NO: 51939 - DNA, 50 bp, synthetic construct
  source 1..50: mol_type = other DNA
aagaatactagtgctttattattccaaaacaacaaagaacagcatcaaaa

SEQ ID NO: 51940 - DNA, 50 bp, synthetic construct
  source 1..50: mol_type = other DNA
agcgtttgttagggttaacgctgtatacagcggagtccctcaaagaccct

SEQ ID NO: 51941 - DNA, 50 bp, synthetic construct
  source 1..50: mol_type = other DNA
acatcatggttaattttatgtttaattaaacaaaaattatatcccaccac

SEQ ID NO: 51942 - DNA, 50 bp, synthetic construct
  source 1..50: mol_type = other DNA
aagctttgaagctactcgaccagcgtgcgggtgccgtattttcaaacggt

SEQ ID NO: 51943 - DNA, 50 bp, synthetic construct
  source 1..50: mol_type = other DNA
cctttttaatttaattgcgttagagtggctaaggaattaggtgttaaagg

SEQ ID NO: 51944 - DNA, 50 bp, synthetic construct
  source 1..50: mol_type = other DNA
cctagtttaaaaagcggtgggaattgtaccccttaactgttttagctcgt

SEQ ID NO: 51945 - DNA, 50 bp, synthetic construct
  source 1..50: mol_type = other DNA
attcaatacctaaaatgatgtgtttaaatacactacgagaacatccgaat

SEQ ID NO: 51946 - DNA, 50 bp, synthetic construct
  source 1..50: mol_type = other DNA
cggacgaaggcatttctgcaaccaattaattcttgaaaaagcctatcgag

SEQ ID NO: 51947 - DNA, 50 bp, synthetic construct
  source 1..50: mol_type = other DNA
tataacgataggggctaggtgattaaaatcacatactgaaaatgccgtta

SEQ ID NO: 51948 - DNA, 50 bp, synthetic construct
  source 1..50: mol_type = other DNA
aatatttacagttaagggaacggttaattgtctttttaaataaaaattaa

SEQ ID NO: 51949 - DNA, 50 bp, synthetic construct
  source 1..50: mol_type = other DNA
tctgattttctgatttatttcgctatttagaaataaatctcaccatcaac

SEQ ID NO: 51950 - DNA, 50 bp, synthetic construct
  source 1..50: mol_type = other DNA
ccgacttgagtacctttgcagcacctgcgctgcgtagccaatggggacaa

SEQ ID NO: 51951 - DNA, 50 bp, synthetic construct
  source 1..50: mol_type = other DNA
ccacttcgccttttttcagggctttaaaccctaacaaaaaattctaaatc

SEQ ID NO: 51952 - DNA, 50 bp, synthetic construct
  source 1..50: mol_type = other DNA
tattaggattcactgagtactttttaaaccattgagtgtgaatctcttta

SEQ ID NO: 51953 - DNA, 50 bp, synthetic construct
  source 1..50: mol_type = other DNA
atctatgacctcaatttttggtccgcttatctttaaatgagaatcaattg

SEQ ID NO: 51954 - DNA, 50 bp, synthetic construct
  source 1..50: mol_type = other DNA
gaagctactcgaccagcgttactgttagcaaaggctttgactaacacttc

SEQ ID NO: 51955 - DNA, 50 bp, synthetic construct
  source 1..50: mol_type = other DNA
tacttgatatgggtgttaagctggtcttgccttaacactcatatcattgt

SEQ ID NO: 51956 - DNA, 50 bp, synthetic construct
  source 1..50: mol_type = other DNA
ttcatcatagccatttacccacacaaacggaggtgtatgtctatgtcgaa

SEQ ID NO: 51957 - DNA, 50 bp, synthetic construct
  source 1..50: mol_type = other DNA
ccattattatctcccggcgctgaggccgcagccccggcagctggaattta

SEQ ID NO: 51958 - DNA, 50 bp, synthetic construct
  source 1..50: mol_type = other DNA
caatcccggctgagcgtccagctgaatacgcacccgcttttcagggattc

SEQ ID NO: 51959 - DNA, 50 bp, synthetic construct
  source 1..50: mol_type = other DNA
agaagtttcaggctttgttatcttaaaacacgttctatcatgcaaaaagg

SEQ ID NO: 51960 - DNA, 50 bp, synthetic construct
  source 1..50: mol_type = other DNA
ccagaagccccttggctcctgtaacaggtaaacggccttacatttgttga

SEQ ID NO: 51961 - DNA, 50 bp, synthetic construct
  source 1..50: mol_type = other DNA
tttatccctctttctttatttctataatgaaaaagatcaagagagtcagt

SEQ ID NO: 51962 - DNA, 50 bp, synthetic construct
  source 1..50: mol_type = other DNA
tctatcatctataatatcttttttataaaacaccgcctaatacagatagc

SEQ ID NO: 51963 - DNA, 50 bp, synthetic construct
  source 1..50: mol_type = other DNA
agccccgctcggccttccagtggccggcgcgttcgggccagcagcgggcc

SEQ ID NO: 51964 - DNA, 50 bp, synthetic construct
  source 1..50: mol_type = other DNA
ccagccgcccgtgcgccgagtcccgcgagatccggcgcgtgaaccgatgc

SEQ ID NO: 51965 - DNA, 50 bp, synthetic construct
  source 1..50: mol_type = other DNA
cggccacacgctcgccggagaggccgagctgaccggcaccgcggacgccg

SEQ ID NO: 51966 - DNA, 50 bp, synthetic construct
  source 1..50: mol_type = other DNA
cgagctaaacgctttcaggggtacattttatccacaaagagtttattagc

SEQ ID NO: 51967 - DNA, 50 bp, synthetic construct
  source 1..50: mol_type = other DNA
ttccaaacaaaaacgcccctaccgcgttttaggcgctctcctgaatgcgc

SEQ ID NO: 51968 - DNA, 50 bp, synthetic construct
  source 1..50: mol_type = other DNA
ttgaagctactcgaccagcgttactggtatcgctggaagcagagccggtg

SEQ ID NO: 51969 - DNA, 50 bp, synthetic construct
  source 1..50: mol_type = other DNA
agctggcttcgacaacagttgtcgttgccgaggatctggacgtctcagct

SEQ ID NO: 51970 - DNA, 50 bp, synthetic construct
  source 1..50: mol_type = other DNA
tatccattataacaggaactgaacatgttgttttttagatttagtggcat

SEQ ID NO: 51971 - DNA, 50 bp, synthetic construct
  source 1..50: mol_type = other DNA
ttgaacgtaaaaggacgttcgcaagcttccggcaccggttcccaagcgga

SEQ ID NO: 51972 - DNA, 50 bp, synthetic construct
  source 1..50: mol_type = other DNA
tgtatccgaaatgttgtacaactcttttatttggaaataggagggattca

SEQ ID NO: 51973 - DNA, 50 bp, synthetic construct
  source 1..50: mol_type = other DNA
gacccaggctttttcttcttgtttttctggaccccgaaaaagcccgtggc

SEQ ID NO: 51974 - DNA, 50 bp, synthetic construct
  source 1..50: mol_type = other DNA
atgttgtaataagcgatacacactcaagtgtgttatgcttatacaaacaa

SEQ ID NO: 51975 - DNA, 50 bp, synthetic construct
  source 1..50: mol_type = other DNA
agtgcgtactcaacaaagcaccccgcggggtggagcagctcggtagctcg

SEQ ID NO: 51976 - DNA, 50 bp, synthetic construct
  source 1..50: mol_type = other DNA
gtctgggccgatggcgcgctgggtgcatgccgcatgctgtcggccagtaa

SEQ ID NO: 51977 - DNA, 50 bp, synthetic construct
  source 1..50: mol_type = other DNA
cgctggtggatatccggcacattgatagcgatgctcctggatcaacagta

SEQ ID NO: 51978 - DNA, 50 bp, synthetic construct
  source 1..50: mol_type = other DNA
cacggtcacgcccactagtttgtgcggacaaacgtactgcgactactgtc

SEQ ID NO: 51979 - DNA, 50 bp, synthetic construct
  source 1..50: mol_type = other DNA
tcatgcggtcagctccttggtgtttgatcaccaaggatcatcccgacata

SEQ ID NO: 51980 - DNA, 50 bp, synthetic construct
  source 1..50: mol_type = other DNA
tggcgaagaccagggcgtcccaatcgacagctacctggactacttttcca

SEQ ID NO: 51981 - DNA, 50 bp, synthetic construct
  source 1..50: mol_type = other DNA
ggcgtcggggctggcgccgtggaacccatggcggcgctgaccgccatgct

SEQ ID NO: 51982 - DNA, 50 bp, synthetic construct
  source 1..50: mol_type = other DNA
cagcggttatccgacaggctgggggtcacaggcctgctgaccaacgcatt

SEQ ID NO: 51983 - DNA, 50 bp, synthetic construct
  source 1..50: mol_type = other DNA
tgtaatcctgcaccaccgagaccagctggaactggtggccaaggaaggca

SEQ ID NO: 51984 - DNA, 50 bp, synthetic construct
  source 1..50: mol_type = other DNA
tggggtcgggtagagccggggtgggactcatctggcgttagatagcgccc

SEQ ID NO: 51985 - DNA, 50 bp, synthetic construct
  source 1..50: mol_type = other DNA
cgttgaagccgtgcccggcgtccagcccgtggtcggcctcttcggcaggc

SEQ ID NO: 51986 - DNA, 50 bp, synthetic construct
  source 1..50: mol_type = other DNA
cagggccacccgtgggaccggtcggaccaccgtgtagagaattgccccga

SEQ ID NO: 51987 - DNA, 50 bp, synthetic construct
  source 1..50: mol_type = other DNA
tagactttttccgtgaaggtaaaatcaagtaacgcactcgaaaaaggcta

SEQ ID NO: 51988 - DNA, 50 bp, synthetic construct
  source 1..50: mol_type = other DNA
tcagccgctactcggaggaaacccgaaggttatggctgagccgggcgacg

SEQ ID NO: 51989 - DNA, 50 bp, synthetic construct
  source 1..50: mol_type = other DNA
ggctctttgtagggcggccagcggcgctttacgacgccgtctgcgaagcc

SEQ ID NO: 51990 - DNA, 50 bp, synthetic construct
  source 1..50: mol_type = other DNA
cagcctctgccttggccacggcccggcggtgtttccgctggcaaaggcgc

SEQ ID NO: 51991 - DNA, 50 bp, synthetic construct
  source 1..50: mol_type = other DNA
tcgaggcgctggcagacggtgatggccgtcaccgtagttgggcccaggta

SEQ ID NO: 51992 - DNA, 50 bp, synthetic construct
  source 1..50: mol_type = other DNA
tgttgctgacactcgggatgacctgccagcctctcgcttagtcagttact

SEQ ID NO: 51993 - DNA, 50 bp, synthetic construct
  source 1..50: mol_type = other DNA
ccgacttgagtacctttgcagcacctgcgctgcgtagccaatagggacaa

SEQ ID NO: 51994 - DNA, 50 bp, synthetic construct
  source 1..50: mol_type = other DNA
ccatccacctgggtgagacaaaggtatgataaggacctccctaacgactc

SEQ ID NO: 51995 - DNA, 50 bp, synthetic construct
  source 1..50: mol_type = other DNA
ccatttctataactttaagtacttacagctggaaaaaaagtcagaaaggg

SEQ ID NO: 51996 - DNA, 50 bp, synthetic construct
  source 1..50: mol_type = other DNA
gcccggcatccctgcgggcaccgaactcgttgccctcggggtctccgagc

SEQ ID NO: 51997 - DNA, 50 bp, synthetic construct
  source 1..50: mol_type = other DNA
ctaacaccgcatcctggtttggcttgccggaaaccgcgcttaactgttgt

SEQ ID NO: 51998 - DNA, 50 bp, synthetic construct
  source 1..50: mol_type = other DNA
gcgtgtcggtgctttttccggccacctggctagaaaacgcacagccagcg

SEQ ID NO: 51999 - DNA, 50 bp, synthetic construct
  source 1..50: mol_type = other DNA
tgcctctccactgaatttgcccggttaggggctttttcatgccttctgct

SEQ ID NO: 52000 - DNA, 50 bp, synthetic construct
  source 1..50: mol_type = other DNA
aaagataagcttataaccattatggcggtaatggtaatgtgctgtgcctt

SEQ ID NO: 52001 - DNA, 50 bp, synthetic construct
  source 1..50: mol_type = other DNA
ggcgaggcccggcggatcggcccggctcagcggcggcgccgggcctccca

SEQ ID NO: 52002 - DNA, 50 bp, synthetic construct
  source 1..50: mol_type = other DNA
ataggtttctgtccctttttataaactattaattgccgttatgaacctca

SEQ ID NO: 52003 - DNA, 50 bp, synthetic construct
  source 1..50: mol_type = other DNA
cttaagtagattgcagttttcataaggaataaaactataatcaactttta

SEQ ID NO: 52004 - DNA, 50 bp, synthetic construct
  source 1..50: mol_type = other DNA
tataagtaatgaataataaaagaaaacgaattggtttcggatttacgggt

SEQ ID NO: 52005 - DNA, 50 bp, synthetic construct
  source 1..50: mol_type = other DNA
gttttgcctaaaggagcatttacacttgaaagtgctatgttaggcaaaaa

SEQ ID NO: 52006 - DNA, 50 bp, synthetic construct
  source 1..50: mol_type = other DNA
cttcatttaagcggtagctgtaataaataagatggcgaaactacctaata

SEQ ID NO: 52007 - DNA, 50 bp, synthetic construct
  source 1..50: mol_type = other DNA
ttaagtagaagttatagtttttattaaagaatattacaaattcctctttt

SEQ ID NO: 52008 - DNA, 50 bp, synthetic construct
  source 1..50: mol_type = other DNA
atatgtccttgatcccaatttgtaattggggttatataattcagacataa

SEQ ID NO: 52009 - DNA, 50 bp, synthetic construct
  source 1..50: mol_type = other DNA
taactattatataaaaggcgtttattaaggctcgttgtatatatagcaag

SEQ ID NO: 52010 - DNA, 50 bp, synthetic construct
  source 1..50: mol_type = other DNA
atgaatatagaagcgttgttttctatagaataggtactaattatagacaa

SEQ ID NO: 52011 - DNA, 50 bp, synthetic construct
  source 1..50: mol_type = other DNA
ctttccttttttagctttgcaatgtagattcaatttataaaaaagatatt

SEQ ID NO: 52012 - DNA, 50 bp, synthetic construct
  source 1..50: mol_type = other DNA
tatataaaaaataatacgaataaatacttattataggaggattttataaa

SEQ ID NO: 52013 - DNA, 50 bp, synthetic construct
  source 1..50: mol_type = other DNA
tagctcttgagccagttcgtcagcaaggtgacgacaaggcataaacgctt

SEQ ID NO: 52014 - DNA, 50 bp, synthetic construct
  source 1..50: mol_type = other DNA
aatggagtttaattgatgttatattgcggtaacatagatctaaatggttt

SEQ ID NO: 52015 - DNA, 50 bp, synthetic construct
  source 1..50: mol_type = other DNA
aaatgataaaacataagactggttcaattcaagatccagtttcattattt

SEQ ID NO: 52016 - DNA, 50 bp, synthetic construct
  source 1..50: mol_type = other DNA
ttataagaaagaaaagtggcaaaggctccttcctggagcttttcttttat

SEQ ID NO: 52017 - DNA, 50 bp, synthetic construct
  source 1..50: mol_type = other DNA
gttttacttatagtacttaattcgctcccgtcatttaccataagtaaaac

SEQ ID NO: 52018 - DNA, 50 bp, synthetic construct
  source 1..50: mol_type = other DNA
aatggattattgcggatggaaaacatgttttatccacctataatgtataa

SEQ ID NO: 52019 - DNA, 50 bp, synthetic construct
  source 1..50: mol_type = other DNA
taaaagaagaaatcgctgattggcttacaaatgttaattttctattttta

SEQ ID NO: 52020 - DNA, 50 bp, synthetic construct
  source 1..50: mol_type = other DNA
ttaattatacgaaaagtaaataagattttattttattcttccgtaaaggt

SEQ ID NO: 52021 - DNA, 50 bp, synthetic construct
  source 1..50: mol_type = other DNA
aatatacattttctttatagttttaaattnnaatttagttggttattggt

SEQ ID NO: 52022 - DNA, 50 bp, synthetic construct
  source 1..50: mol_type = other DNA
tttaaaaagagagaaggttattatcagaatggggcttttcttttgttatt

SEQ ID NO: 52023 - DNA, 50 bp, synthetic construct
  source 1..50: mol_type = other DNA
tcttaagtagattgcggttttcatagaataagaccagccgttatgtaggc

SEQ ID NO: 52024 - DNA, 50 bp, synthetic construct
  source 1..50: mol_type = other DNA
ttaacaaatactggtaattattgaataactggattattagacggtgcttc

SEQ ID NO: 52025 - DNA, 50 bp, synthetic construct
  source 1..50: mol_type = other DNA
aactagcgaaagaagtaattataactttagatgccattattttgccagtt

SEQ ID NO: 52026 - DNA, 50 bp, synthetic construct
  source 1..50: mol_type = other DNA
tattaaaccacttagaaaaaaaatttagttttttgcttagattttttata

SEQ ID NO: 52027 - DNA, 50 bp, synthetic construct
  source 1..50: mol_type = other DNA
aacacattggtgtataacttgaattttatcaagatttaatacaacaagtt

SEQ ID NO: 52028 - DNA, 50 bp, synthetic construct
  source 1..50: mol_type = other DNA
tcctcaagatggcgacatataagcgttttttatttcttctattatatata

SEQ ID NO: 52029 - DNA, 50 bp, synthetic construct
  source 1..50: mol_type = other DNA
atcaattataaaacattagatgaattatcattacttttcgtataattgat

SEQ ID NO: 52030 - DNA, 50 bp, synthetic construct
  source 1..50: mol_type = other DNA
aaaagccctcataaagtgggcctttaaaaggaaacttaatgttaagttta

SEQ ID NO: 52031 - DNA, 50 bp, synthetic construct
  source 1..50: mol_type = other DNA
tgatatttgtctaaagcctattatattttctactgattttaaggacatca

SEQ ID NO: 52032 - DNA, 50 bp, synthetic construct
  source 1..50: mol_type = other DNA
aaacatataaaagtgagttgtataattttacttttcacaattggttgttt

SEQ ID NO: 52033 - DNA, 50 bp, synthetic construct
  source 1..50: mol_type = other DNA
gacaaataagcgtttgctttttgttgacaaagatatttattttttaattt

SEQ ID NO: 52034 - DNA, 50 bp, synthetic construct
  source 1..50: mol_type = other DNA
atttttaccattacggctcatacggctatgaaaaccgcaatctacttaag

SEQ ID NO: 52035 - DNA, 50 bp, synthetic construct
  source 1..50: mol_type = other DNA
gttttcataatgttgcctcctttaactaattatggataacttaaattcat

SEQ ID NO: 52036 - DNA, 50 bp, synthetic construct
  source 1..50: mol_type = other DNA
attattagtacctattctgtatgtctttctatataataactactaacaag

SEQ ID NO: 52037 - DNA, 50 bp, synthetic construct
  source 1..50: mol_type = other DNA
taaatttggtaagttgttacttacatgtaaggaagtgttttataaataat

SEQ ID NO: 52038 - DNA, 50 bp, synthetic construct
  source 1..50: mol_type = other DNA
aacataatatccaccgagtaaaaatattttctcctcctacataatatatt

SEQ ID NO: 52039 - DNA, 50 bp, synthetic construct
  source 1..50: mol_type = other DNA
aataaacgtttgctttttgtcgtcattacaacaaaaatatttactttttc

SEQ ID NO: 52040 - DNA, 50 bp, synthetic construct
  source 1..50: mol_type = other DNA
gaaaattaatataaagtttttataactattcaataattaacagtatttgt

SEQ ID NO: 52041 - DNA, 50 bp, synthetic construct
  source 1..50: mol_type = other DNA
aaaaaacaaatcagtagttaatatgtttattaattaaagttttatttttc

SEQ ID NO: 52042 - DNA, 50 bp, synthetic construct
  source 1..50: mol_type = other DNA
tacgaaaagtaaataagataaattatttcagtattaatttctttttggag

SEQ ID NO: 52043 - DNA, 50 bp, synthetic construct
  source 1..50: mol_type = other DNA
aagccctaaagcatcattcgtcgaaattaaaagatggttctttatatcca

SEQ ID NO: 52044 - DNA, 50 bp, synthetic construct
  source 1..50: mol_type = other DNA
aagaaagaaatcaaaacagaaattaagccctctttatgcgggcttttctt

SEQ ID NO: 52045 - DNA, 50 bp, synthetic construct
  source 1..50: mol_type = other DNA
gcatatcctccttttaatagttattaaggaatattcagatatacatatta

SEQ ID NO: 52046 - DNA, 50 bp, synthetic construct
  source 1..50: mol_type = other DNA
tctctcctttgtttagtaataattataaatgacagaaaaagaaggtgaat

SEQ ID NO: 52047 - DNA, 50 bp, synthetic construct
  source 1..50: mol_type = other DNA
cgtataactgaaattacttccactatatctcgtataataactattaacaa

SEQ ID NO: 52048 - DNA, 50 bp, synthetic construct
  source 1..50: mol_type = other DNA
ctttcaatttatttttaaattatatttttaatttaaaagaaatttgataa

SEQ ID NO: 52049 - DNA, 50 bp, synthetic construct
  source 1..50: mol_type = other DNA
aataacaaaagaaaagccccattctgataataaccttctctctttttaaa

SEQ ID NO: 52050 - DNA, 50 bp, synthetic construct
  source 1..50: mol_type = other DNA
aaataactccagagttaccacgagcttttttattaactatttacttcttt

SEQ ID NO: 52051 - DNA, 50 bp, synthetic construct
  source 1..50: mol_type = other DNA
atattatctttgtttttttatataattacttaaaaacgccaaatgatttc

SEQ ID NO: 52052 - DNA, 50 bp, synthetic construct
  source 1..50: mol_type = other DNA
tgggatttaatagacgataaaaccaaaacactattttctataattggacg

SEQ ID NO: 52053 - DNA, 50 bp, synthetic construct
  source 1..50: mol_type = other DNA
ccacatcatatgtaatgtacgagtttacttctttatttcatccactatcc

SEQ ID NO: 52054 - DNA, 50 bp, synthetic construct
  source 1..50: mol_type = other DNA
cgttgtcatcatgttggtgtaaacctaattacaccaacaaggtggcaaca

SEQ ID NO: 52055 - DNA, 50 bp, synthetic construct
  source 1..50: mol_type = other DNA
aatttaattaaagtaaataaaattaaggaattaaaatgattaaataattt

SEQ ID NO: 52056 - DNA, 50 bp, synthetic construct
  source 1..50: mol_type = other DNA
ctccaaaaagaaattaatactgaaataatttatcttatttacttttcgta

SEQ ID NO: 52057 - DNA, 50 bp, synthetic construct
  source 1..50: mol_type = other DNA
agtaataattatacgaaaagtaagtgaaacctttttatatgtaatatagt

SEQ ID NO: 52058 - DNA, 50 bp, synthetic construct
  source 1..50: mol_type = other DNA
atgttttcgactacaatgacaacaaatgatgctcttggccttaatggtgt

SEQ ID NO: 52059 - DNA, 50 bp, synthetic construct
  source 1..50: mol_type = other DNA
catagttagccctccttattactaatattgagaaagaagtaggaaatatc

SEQ ID NO: 52060 - DNA, 50 bp, synthetic construct
  source 1..50: mol_type = other DNA
cactctccccctaccgaattatgaattagtaatacttaagggggacttcc

SEQ ID NO: 52061 - DNA, 50 bp, synthetic construct
  source 1..50: mol_type = other DNA
acaccattaaggccaagagcatcatttgttgtcattgtagtcgaaaacat

SEQ ID NO: 52062 - DNA, 50 bp, synthetic construct
  source 1..50: mol_type = other DNA
ttaaaaattgtagaaatagagtttaaaaaacacattaactactgatttag

SEQ ID NO: 52063 - DNA, 50 bp, synthetic construct
  source 1..50: mol_type = other DNA
ttttaacgtttcaactgtttgttcaagcctgtcgtattggcagtttcgac

SEQ ID NO: 52064 - DNA, 50 bp, synthetic construct
  source 1..50: mol_type = other DNA
tttatcactaatacaatttaataaaacaaactgttactgctagtgttaaa

SEQ ID NO: 52065 - DNA, 50 bp, synthetic construct
  source 1..50: mol_type = other DNA
aattttcaattattattaaacctaatatacttaacctataattttaaaca

SEQ ID NO: 52066 - DNA, 50 bp, synthetic construct
  source 1..50: mol_type = other DNA
taaatatgctgctgtagtaaactcaacaaggtaacgacaaagcataaacg

SEQ ID NO: 52067 - DNA, 50 bp, synthetic construct
  source 1..50: mol_type = other DNA
ataaggaggcggtatagtgtcgcaatttgtaatttctcaggcgtaattat

SEQ ID NO: 52068 - DNA, 50 bp, synthetic construct
  source 1..50: mol_type = other DNA
gtagattgcggttttcatggtgggaaaagaaaataaaattagcaacatat

SEQ ID NO: 52069 - DNA, 50 bp, synthetic construct
  source 1..50: mol_type = other DNA
ctctaacaatgttattaaattgtatccagtatttgttaaaattatttata

SEQ ID NO: 52070 - DNA, 50 bp, synthetic construct
  source 1..50: mol_type = other DNA
atttccctccatttttgaattaattatataataaaaaaatcgatgataaa

SEQ ID NO: 52071 - DNA, 50 bp, synthetic construct
  source 1..50: mol_type = other DNA
tgtgtacatcggaaaagtaacatggctagtttacttttcgtataataact

SEQ ID NO: 52072 - DNA, 50 bp, synthetic construct
  source 1..50: mol_type = other DNA
ataatattcagttttcagatactgcataggttataaaaattttatattaa

SEQ ID NO: 52073 - DNA, 50 bp, synthetic construct
  source 1..50: mol_type = other DNA
aggtagattgcagttttcataatatataacgaaagaacaaattgaaaata

SEQ ID NO: 52074 - DNA, 50 bp, synthetic construct
  source 1..50: mol_type = other DNA
ataggttgaaacctaaaacgcacaattgtgcgttcggcaatgcgcgcttt

SEQ ID NO: 52075 - DNA, 50 bp, synthetic construct
  source 1..50: mol_type = other DNA
gatacttgtcgtcctccgtgggagcccatcccgatagcaattttaaaatg

SEQ ID NO: 52076 - DNA, 50 bp, synthetic construct
  source 1..50: mol_type = other DNA
aaattcaagtgattattattgttataagagcctgtaaatggctctttttt

SEQ ID NO: 52077 - DNA, 50 bp, synthetic construct
  source 1..50: mol_type = other DNA
attaaagattatcatgcaattggatttaactttccatgcaaaaatttaaa

SEQ ID NO: 52078 - DNA, 50 bp, synthetic construct
  source 1..50: mol_type = other DNA
cagtatagcaatttttcggaaagaattatttacgaagaattgccctattc

SEQ ID NO: 52079 - DNA, 50 bp, synthetic construct
  source 1..50: mol_type = other DNA
gttctagattggctacagtggaagaacactaaaaatcaaaaataatattg

SEQ ID NO: 52080 - DNA, 50 bp, synthetic construct
  source 1..50: mol_type = other DNA
tctcctttcgcacatacgttcttttttctcgaattatttccgaaaaattg

SEQ ID NO: 52081 - DNA, 50 bp, synthetic construct
  source 1..50: mol_type = other DNA
tttagtacctcgttttctctcactggacggagaataaacgagaaactaaa

SEQ ID NO: 52082 - DNA, 50 bp, synthetic construct
  source 1..50: mol_type = other DNA
tgaagcacaacaagtgcgcaaagtttttaaagaaggtaccttatgcaaaa

SEQ ID NO: 52083 - DNA, 50 bp, synthetic construct
  source 1..50: mol_type = other DNA
gggaagtttgtccttcaatatgcaaagaaaaagatttggacaaacttctt

SEQ ID NO: 52084 - DNA, 50 bp, synthetic construct
  source 1..50: mol_type = other DNA
tattgcaagctgtttccgaaaatgatctgttttttaaatctgtttctaat

SEQ ID NO: 52085 - DNA, 50 bp, synthetic construct
  source 1..50: mol_type = other DNA
agattatgccggaaactgcaaaagttctttcctgatttcgtgggtaccct

SEQ ID NO: 52086 - DNA, 50 bp, synthetic construct
  source 1..50: mol_type = other DNA
tttgggaaaacttacagatgacgatatcagcatcagtgaaatacagcaga

SEQ ID NO: 52087 - DNA, 50 bp, synthetic construct
  source 1..50: mol_type = other DNA
cggagatagatttccatcaattcgaattttcttatggaaattctaaacat

SEQ ID NO: 52088 - DNA, 50 bp, synthetic construct
  source 1..50: mol_type = other DNA
ccacactatcgatagaaacagcataaaaggtgaaggaaagtatgcgctcg

SEQ ID NO: 52089 - DNA, 50 bp, synthetic construct
  source 1..50: mol_type = other DNA
agccttattaccccataggcattgggttcagcccatgggcaaattccaaa

SEQ ID NO: 52090 - DNA, 50 bp, synthetic construct
  source 1..50: mol_type = other DNA
taattatatagaaagtaaaggtaagcatagaatagatgattatataattt

SEQ ID NO: 52091 - DNA, 50 bp, synthetic construct
  source 1..50: mol_type = other DNA
tgcacagaaaatatggtccaaacacggagaaccgccctatgacccgtgta

SEQ ID NO: 52092 - DNA, 50 bp, synthetic construct
  source 1..50: mol_type = other DNA
gaagcagttaagattgagaaactattctggtcattaacggaagaaacatc

SEQ ID NO: 52093 - DNA, 50 bp, synthetic construct
  source 1..50: mol_type = other DNA
tattttatataattgtatggtaagtttttacaataaaaaattatatattt

SEQ ID NO: 52094 - DNA, 50 bp, synthetic construct
  source 1..50: mol_type = other DNA
atatctgatgtgatggaattaatgtacattaattcgctgttgtctgatat

SEQ ID NO: 52095 - DNA, 50 bp, synthetic construct
  source 1..50: mol_type = other DNA
agcgtcgccgagtgcaaacggctagacagcgcgcctcagccggcgtcgtt

SEQ ID NO: 52096 - DNA, 50 bp, synthetic construct
  source 1..50: mol_type = other DNA
tgtagacgtattctgcctgtctgaatgcagatcctattcatttgtcaaaa

SEQ ID NO: 52097 - DNA, 50 bp, synthetic construct
  source 1..50: mol_type = other DNA
taaaaaatgtactcaaatcctcaatagggaatatgtgctgtcatttacat

SEQ ID NO: 52098 - DNA, 50 bp, synthetic construct
  source 1..50: mol_type = other DNA
taggcattttctttcaccgcgctcctatgcttcttgcaagaaaatcactc

SEQ ID NO: 52099 - DNA, 50 bp, synthetic construct
  source 1..50: mol_type = other DNA
ggccagaggaaagtcaaactgcgtcaccgctttcccattttcaatgcggt

SEQ ID NO: 52100 - DNA, 50 bp, synthetic construct
  source 1..50: mol_type = other DNA
agtcccacgaaaagcgcattttaaatagcaaggataattttacaaatact

SEQ ID NO: 52101 - DNA, 50 bp, synthetic construct
  source 1..50: mol_type = other DNA
tcctaataagggcggaaatgattgttgaaggatttttatttggataagga

SEQ ID NO: 52102 - DNA, 50 bp, synthetic construct
  source 1..50: mol_type = other DNA
aaaatataggtcataccggctgccagtgtagctggtatgacctgcacttt

SEQ ID NO: 52103 - DNA, 50 bp, synthetic construct
  source 1..50: mol_type = other DNA
tcattttaacgctccttatctttttcaaatattaagttaatttacttccg

SEQ ID NO: 52104 - DNA, 50 bp, synthetic construct
  source 1..50: mol_type = other DNA
aatatactatgaattgttacaaaaaattttagaagaaaaaataggatata

SEQ ID NO: 52105 - DNA, 50 bp, synthetic construct
  source 1..50: mol_type = other DNA
accggaggactatgacggcggcgagctcgtcgggctcataacccgaaggt

SEQ ID NO: 52106 - DNA, 50 bp, synthetic construct
  source 1..50: mol_type = other DNA
ggctaggtgattaaagattaaagaattctggaatcttccttcctgatttt

SEQ ID NO: 52107 - DNA, 50 bp, synthetic construct
  source 1..50: mol_type = other DNA
tgcccttactttctttttcatccggaaagatgatatagagactatcttgg

SEQ ID NO: 52108 - DNA, 50 bp, synthetic construct
  source 1..50: mol_type = other DNA
ctttaactatatttatatcgagttttgacttgatatacggtgagttcaga

SEQ ID NO: 52109 - DNA, 50 bp, synthetic construct
  source 1..50: mol_type = other DNA
ctggagcggttacagaacctgcgtacacgcacatggaaagaccgctcccg

SEQ ID NO: 52110 - DNA, 50 bp, synthetic construct
  source 1..50: mol_type = other DNA
cctggtccagggcatcgtcgtcttccccgcggacgcggccctggctctgg

SEQ ID NO: 52111 - DNA, 50 bp, synthetic construct
  source 1..50: mol_type = other DNA
ccattgattcactcaccagccttgaaaaggggaggtgattgaatggcggt

SEQ ID NO: 52112 - DNA, 50 bp, synthetic construct
  source 1..50: mol_type = other DNA
aagcaatcgttatagagtaagtaatgttcctttctttatgcccgagacta

SEQ ID NO: 52113 - DNA, 50 bp, synthetic construct
  source 1..50: mol_type = other DNA
tcacaggaataaattataacacaggcgtctaaggaatcatactccctaga

SEQ ID NO: 52114 - DNA, 50 bp, synthetic construct
  source 1..50: mol_type = other DNA
agttctgctgcgccggcgaccggtgctgcgggcgacggcgctatgaaccg

SEQ ID NO: 52115 - DNA, 50 bp, synthetic construct
  source 1..50: mol_type = other DNA
cattgtgaagaaataaatatgataatttcggttttaatttctttctttaa

SEQ ID NO: 52116 - DNA, 50 bp, synthetic construct
  source 1..50: mol_type = other DNA
tttacacctttttcgtatattaggtacctaatatacgaaattatgtaaaa

SEQ ID NO: 52117 - DNA, 50 bp, synthetic construct
  source 1..50: mol_type = other DNA
ttacctctttttataaaaagaattattacacttattataagtgatttatt

SEQ ID NO: 52118 - DNA, 50 bp, synthetic construct
  source 1..50: mol_type = other DNA
aaatttttttcaattttttataaatttgtattcaaaacagaaaaaaagac

SEQ ID NO: 52119 - DNA, 50 bp, synthetic construct
  source 1..50: mol_type = other DNA
tctataattatatacactacttattaataattcacctgcatacttactac

SEQ ID NO: 52120 - DNA, 50 bp, synthetic construct
  source 1..50: mol_type = other DNA
gcatgatgtgacccgtggtcgacaggcctcgaccacgccctcaccgatgc

SEQ ID NO: 52121 - DNA, 50 bp, synthetic construct
  source 1..50: mol_type = other DNA
tttgtcgaagccattgaacctacaaacgttcgttcaatggaagagatgtg

SEQ ID NO: 52122 - DNA, 50 bp, synthetic construct
  source 1..50: mol_type = other DNA
cttttaattgtatcataaaagacaatctatggaaatgatacaaaccaaac

SEQ ID NO: 52123 - DNA, 50 bp, synthetic construct
  source 1..50: mol_type = other DNA
gcagagcagctaaagaagctattcaagaagttttaaatatagtcggtcaa

SEQ ID NO: 52124 - DNA, 50 bp, synthetic construct
  source 1..50: mol_type = other DNA
gaggtggaagaatgtataacttttcttcaaggtaagcctgattacatttt

SEQ ID NO: 52125 - DNA, 50 bp, synthetic construct
  source 1..50: mol_type = other DNA
tatcatcttacctacgtttttatttaatgataataataggaaaggagaca

SEQ ID NO: 52126 - DNA, 50 bp, synthetic construct
  source 1..50: mol_type = other DNA
attgtaatatgattggaacaaaagaagttaaaatccaacattattatttc

SEQ ID NO: 52127 - DNA, 50 bp, synthetic construct
  source 1..50: mol_type = other DNA
ccatactgttgaacagacgaagagaagtccagactggtatggcaatatgc

SEQ ID NO: 52128 - DNA, 50 bp, synthetic construct
  source 1..50: mol_type = other DNA
cataattatatagcatttttacaattgagtaagaatggtttttaatattc

SEQ ID NO: 52129 - DNA, 50 bp, synthetic construct
  source 1..50: mol_type = other DNA
cttggatatgcaaatactttcaaaatatataatgtataggattatccata

SEQ ID NO: 52130 - DNA, 50 bp, synthetic construct
  source 1..50: mol_type = other DNA
taaccattccgggttaaagtaggatatcctacttcaccggcaacgcttta

SEQ ID NO: 52131 - DNA, 50 bp, synthetic construct
  source 1..50: mol_type = other DNA
cgtactttacccaattaaatcaccttggtcctttagaatttttaatcacc

SEQ ID NO: 52132 - DNA, 50 bp, synthetic construct
  source 1..50: mol_type = other DNA
aatggcggaaatgtttgtttatttaattccgacttcacaagagaagcagt

SEQ ID NO: 52133 - DNA, 50 bp, synthetic construct
  source 1..50: mol_type = other DNA
gaaatgtagtctttactatctacaattataactagtaaagatggtgattt

SEQ ID NO: 52134 - DNA, 50 bp, synthetic construct
  source 1..50: mol_type = other DNA
gcaagcatcacaaatgggtgtttgtacttacctaactttcttactatagc

SEQ ID NO: 52135 - DNA, 50 bp, synthetic construct
  source 1..50: mol_type = other DNA
tcacagcctttaggggtgaagtaacctaacaagacttaccgttaaagtga

SEQ ID NO: 52136 - DNA, 50 bp, synthetic construct
  source 1..50: mol_type = other DNA
gaacttataaacgttatggctaatgcaacagcctgattatttaacaggtt

SEQ ID NO: 52137 - DNA, 50 bp, synthetic construct
  source 1..50: mol_type = other DNA
catactgctgaataggcgaggaaaattttttagatacaaacagctttacc

SEQ ID NO: 52138 - DNA, 50 bp, synthetic construct
  source 1..50: mol_type = other DNA
attgttttagatgcacatgaaccaatatactcgtcctatactaatggaat

SEQ ID NO: 52139 - DNA, 50 bp, synthetic construct
  source 1..50: mol_type = other DNA
tgcttgtctttggcgtaccatatacccgtgttatactttacttgcaagca

SEQ ID NO: 52140 - DNA, 50 bp, synthetic construct
  source 1..50: mol_type = other DNA
aggtcaaggcttttaccttgttagaaaagctaaggttaaagcttttacat

SEQ ID NO: 52141 - DNA, 50 bp, synthetic construct
  source 1..50: mol_type = other DNA
ggaaatcaaaaaaagttacagaaattttcttgtacctattttatcaaaaa

SEQ ID NO: 52142 - DNA, 50 bp, synthetic construct
  source 1..50: mol_type = other DNA
tttctatcacagataacgaaggaaattaaaaaaattatatatgatataga

SEQ ID NO: 52143 - DNA, 50 bp, synthetic construct
  source 1..50: mol_type = other DNA
aatgaaagaaacagaaacaaaatgtgacttttgtttatttttatttcttt

SEQ ID NO: 52144 - DNA, 50 bp, synthetic construct
  source 1..50: mol_type = other DNA
cacaccagaaatgattgctaaaataggatttacgaccaatttcagcttgt

SEQ ID NO: 52145 - DNA, 50 bp, synthetic construct
  source 1..50: mol_type = other DNA
aatagcagttgggcttgttatgaggagaataaaagttaccaaagtcgatc

SEQ ID NO: 52146 - DNA, 50 bp, synthetic construct
  source 1..50: mol_type = other DNA
gtgttatacattgattgtagttttataaaaacgatatgattatattatca

SEQ ID NO: 52147 - DNA, 50 bp, synthetic construct
  source 1..50: mol_type = other DNA
ctcgttgaaaatgtggtcttttatgtagtaaggaataacttttcctatat

SEQ ID NO: 52148 - DNA, 50 bp, synthetic construct
  source 1..50: mol_type = other DNA
tatagttatttaattgatattctctccccctgattaataaattaactatt

SEQ ID NO: 52149 - DNA, 50 bp, synthetic construct
  source 1..50: mol_type = other DNA
cagatctgcctaaacagggtggccgctatgaccggaattggccatagcta

SEQ ID NO: 52150 - DNA, 50 bp, synthetic construct
  source 1..50: mol_type = other DNA
taacgtatagtatattatgtctgaattcacttctggtataatataagcac

SEQ ID NO: 52151 - DNA, 50 bp, synthetic construct
  source 1..50: mol_type = other DNA
ggttgtctacagtctggtcttgtgttatcaccgtgagaaccgtaataaca

SEQ ID NO: 52152 - DNA, 50 bp, synthetic construct
  source 1..50: mol_type = other DNA
tgcccggccaagacggtaaacaaatcagagtcgaccgttgccttggggca

SEQ ID NO: 52153 - DNA, 50 bp, synthetic construct
  source 1..50: mol_type = other DNA
ttaatctttattaaatgaatcttctaaagaaaaattttagctaagatatt

SEQ ID NO: 52154 - DNA, 50 bp, synthetic construct
  source 1..50: mol_type = other DNA
agatgctgttctaattaagtaatttaaaatgctaggttattcaattatta

SEQ ID NO: 52155 - DNA, 50 bp, synthetic construct
  source 1..50: mol_type = other DNA
attttgtataaatttaccttacaattaatggaggtcttgttatgaaaaaa

SEQ ID NO: 52156 - DNA, 50 bp, synthetic construct
  source 1..50: mol_type = other DNA
agaattataaattatttcatcttccaataaatgttataattaatatgtaa

SEQ ID NO: 52157 - DNA, 50 bp, synthetic construct
  source 1..50: mol_type = other DNA
tttaactaatggtgaaatttttaatattcatattttcaaattcttttata

SEQ ID NO: 52158 - DNA, 50 bp, synthetic construct
  source 1..50: mol_type = other DNA
aattagattttaaagttaaatacaatgtatatcaacttaatattcttaat

SEQ ID NO: 52159 - DNA, 50 bp, synthetic construct
  source 1..50: mol_type = other DNA
aaattcctttcataaatccaataacattattggatttatgacttgatata

SEQ ID NO: 52160 - DNA, 50 bp, synthetic construct
  source 1..50: mol_type = other DNA
ttggttgggtgctatttttttgttactgggcaaaaaacgcacccaaattt

SEQ ID NO: 52161 - DNA, 50 bp, synthetic construct
  source 1..50: mol_type = other DNA
gtactgtatagatattcagcctgtttagcttaggatcatttatatttaac

SEQ ID NO: 52162 - DNA, 50 bp, synthetic construct
  source 1..50: mol_type = other DNA
aatggttgacatggcaaacctcctttaggagaattataaactcaaccatg

SEQ ID NO: 52163 - DNA, 50 bp, synthetic construct
  source 1..50: mol_type = other DNA
ttggaaataaagtagaatactcttccacaatagttgcccactatcatcat

SEQ ID NO: 52164 - DNA, 50 bp, synthetic construct
  source 1..50: mol_type = other DNA
gagaagtcatatcaatctgatatgatccagaacgattgaaaaaacatgaa

SEQ ID NO: 52165 - DNA, 50 bp, synthetic construct
  source 1..50: mol_type = other DNA
aagctcaagaagtaagagagttttttccaaataaattaagcaaggatttt

SEQ ID NO: 52166 - DNA, 50 bp, synthetic construct
  source 1..50: mol_type = other DNA
ttgaaagggcatcgtaaaagtcaaaaagtataccgccatttatatttcat

SEQ ID NO: 52167 - DNA, 50 bp, synthetic construct
  source 1..50: mol_type = other DNA
tcgcacggtcactgcgatacccgcaacgctagatcagattgacctgtata

SEQ ID NO: 52168 - DNA, 50 bp, synthetic construct
  source 1..50: mol_type = other DNA
cgggccgattgagaaactgaacgcgatcgaggccttcgagcatcagctca

SEQ ID NO: 52169 - DNA, 50 bp, synthetic construct
  source 1..50: mol_type = other DNA
atgactgatcttctcccctctcggtaatatggagggagtaggtttgcgaa

SEQ ID NO: 52170 - DNA, 50 bp, synthetic construct
  source 1..50: mol_type = other DNA
tagtgcatttagaccttgatgatttttattagacacgtttaaatacacca

SEQ ID NO: 52171 - DNA, 50 bp, synthetic construct
  source 1..50: mol_type = other DNA
ccgcagcagtacgagcaagtggtcaggggcacatgcgcgtgctgagtaag

SEQ ID NO: 52172 - DNA, 50 bp, synthetic construct
  source 1..50: mol_type = other DNA
ttccattgtatttcaaatagtctatatcaaccatttataagtcaattatc

SEQ ID NO: 52173 - DNA, 50 bp, synthetic construct
  source 1..50: mol_type = other DNA
acaagtgtttatgtaattttttttattaaacaaattgaatatgactttgg

SEQ ID NO: 52174 - DNA, 50 bp, synthetic construct
  source 1..50: mol_type = other DNA
gaactgaggtagatttataaagcaaagtttttgtaaatgaatctcggttt

SEQ ID NO: 52175 - DNA, 50 bp, synthetic construct
  source 1..50: mol_type = other DNA
ttctctccattttcaaaagtaactgtacttactgttagaatgccagactt

SEQ ID NO: 52176 - DNA, 50 bp, synthetic construct
  source 1..50: mol_type = other DNA
cgttactatatatcactctaaagctctttctgtataattatatactaaaa

SEQ ID NO: 52177 - DNA, 50 bp, synthetic construct
  source 1..50: mol_type = other DNA
tcataattgatggtgaattacatggaagaggtagtcagaatcaatgatga

SEQ ID NO: 52178 - DNA, 50 bp, synthetic construct
  source 1..50: mol_type = other DNA
tttccatttctataggtagctttagcttcaggaacccagagaccaacctt

SEQ ID NO: 52179 - DNA, 50 bp, synthetic construct
  source 1..50: mol_type = other DNA
gaccctacagttcttatcgaacaacgtcgtttggtaaagctcggcaggtc

SEQ ID NO: 52180 - DNA, 50 bp, synthetic construct
  source 1..50: mol_type = other DNA
ctaagagttttagatacgctaattgaatgctttgtatctaaaactcttaa

SEQ ID NO: 52181 - DNA, 50 bp, synthetic construct
  source 1..50: mol_type = other DNA
gctggaataactataatacttttcccagtgataaatacttttatcactgg

SEQ ID NO: 52182 - DNA, 50 bp, synthetic construct
  source 1..50: mol_type = other DNA
accaactatttcgacctgataaatttgtttttgttaaaaaaattgttgtc

SEQ ID NO: 52183 - DNA, 50 bp, synthetic construct
  source 1..50: mol_type = other DNA
taacaggtataatatcagggtatctagtttgtctgataacttgactaatt

SEQ ID NO: 52184 - DNA, 50 bp, synthetic construct
  source 1..50: mol_type = other DNA
tgatttgttctgcaccgtctttaccaagaaagtgcagaccagtgttcttc

SEQ ID NO: 52185 - DNA, 50 bp, synthetic construct
  source 1..50: mol_type = other DNA
ctagaaaataaggagaaaaaaactatgactttggtcaacgtatcatctgg

SEQ ID NO: 52186 - DNA, 50 bp, synthetic construct
  source 1..50: mol_type = other DNA
ggacactcgacaatatgcggctacctttagaaaaatctgctcgagtgtcg

SEQ ID NO: 52187 - DNA, 50 bp, synthetic construct
  source 1..50: mol_type = other DNA
ctcccaaatgatagtaatatctcagctgagatgccctcatccgcatagat

SEQ ID NO: 52188 - DNA, 50 bp, synthetic construct
  source 1..50: mol_type = other DNA
ctggcaccgtcgactgggacaccgccggttgtccaggtgtccacccccaa

SEQ ID NO: 52189 - DNA, 50 bp, synthetic construct
  source 1..50: mol_type = other DNA
ttttgtcaaaatgaaactgttctccgagtaatagtatcattttacaaaaa

SEQ ID NO: 52190 - DNA, 50 bp, synthetic construct
  source 1..50: mol_type = other DNA
agcggcctaaatcgacgtataacgagcggtggctaaggaattaggtgtta

SEQ ID NO: 52191 - DNA, 50 bp, synthetic construct
  source 1..50: mol_type = other DNA
atacacttagtttaatgtgtataatttaatacacatctaagtcaaatcat

SEQ ID NO: 52192 - DNA, 50 bp, synthetic construct
  source 1..50: mol_type = other DNA
gtaaatgatcataaagataaatagaggcggttttccgcctcttaatttac

SEQ ID NO: 52193 - DNA, 50 bp, synthetic construct
  source 1..50: mol_type = other DNA
ggtagcctgtcttaacataaaatcctccgataaagttaccccagtatttt

SEQ ID NO: 52194 - DNA, 50 bp, synthetic construct
  source 1..50: mol_type = other DNA
tgattttcacctctcttttttgatgcaaataaaattaaatggaaaagaac

SEQ ID NO: 52195 - DNA, 50 bp, synthetic construct
  source 1..50: mol_type = other DNA
tccagtatcgattttccgattcgtttgcgctcaaataaatcgatgctcga

SEQ ID NO: 52196 - DNA, 50 bp, synthetic construct
  source 1..50: mol_type = other DNA
attcaacacgctatcaaatttatccaggacaattttcacaagacgtcgct

SEQ ID NO: 52197 - DNA, 50 bp, synthetic construct
  source 1..50: mol_type = other DNA
cctagcggaacctgggacctccgcgcatggcgtgtccttccggatcgagc

SEQ ID NO: 52198 - DNA, 50 bp, synthetic construct
  source 1..50: mol_type = other DNA
gacccatgccgtgctgcggtcgaggattcgtacgcagcacgacaagggct

SEQ ID NO: 52199 - DNA, 50 bp, synthetic construct
  source 1..50: mol_type = other DNA
ggactgtaccgaacttcagttccggacatcgatgaagttgaggtgatgtg

SEQ ID NO: 52200 - DNA, 50 bp, synthetic construct
  source 1..50: mol_type = other DNA
taagaatatgaagaagttagatattaatgacttactaaccaatgccccta

SEQ ID NO: 52201 - DNA, 50 bp, synthetic construct
  source 1..50: mol_type = other DNA
tactacctgtaccagcattattaagcttaatgatgaccgtaaaagcttct

SEQ ID NO: 52202 - DNA, 50 bp, synthetic construct
  source 1..50: mol_type = other DNA
atttaaaaagacaattacgatcacatgtgatgctgtaagtattcacgcct

SEQ ID NO: 52203 - DNA, 50 bp, synthetic construct
  source 1..50: mol_type = other DNA
tttcattgaatccctcctatttccaaataagaacgtccacattgatgaag

SEQ ID NO: 52204 - DNA, 50 bp, synthetic construct
  source 1..50: mol_type = other DNA
cttcatggaaactctttgtttttgtataaaaatgtgaagatttggagaac

SEQ ID NO: 52205 - DNA, 50 bp, synthetic construct
  source 1..50: mol_type = other DNA
taaaagaacaaagggaggccatgtatacatatactctggctgtttcatgg

SEQ ID NO: 52206 - DNA, 50 bp, synthetic construct
  source 1..50: mol_type = other DNA
gatactggcgcagatgatgaaaaaccttttccaacttatgcgccaaaatt

SEQ ID NO: 52207 - DNA, 50 bp, synthetic construct
  source 1..50: mol_type = other DNA
acaccgatagccgcgggcgaaagcgaagcgattgcggcggcgaagggtgg

SEQ ID NO: 52208 - DNA, 50 bp, synthetic construct
  source 1..50: mol_type = other DNA
tctgtcattactataattccataaatgccggggattatatagatgccgca

SEQ ID NO: 52209 - DNA, 50 bp, synthetic construct
  source 1..50: mol_type = other DNA
tttttggcgtaattgaccttactttaaatgataatcaattgcatgggagt

SEQ ID NO: 52210 - DNA, 50 bp, synthetic construct
  source 1..50: mol_type = other DNA
cttttgtgtttggctactcttaatggcggcggagtcgaacaaggcaaaag

SEQ ID NO: 52211 - DNA, 50 bp, synthetic construct
  source 1..50: mol_type = other DNA
gtcgacagagcggcgtcgctcggctcgacgagcgctttcgggcacccgag

SEQ ID NO: 52212 - DNA, 50 bp, synthetic construct
  source 1..50: mol_type = other DNA
agaataaagacaaaacaagcagaaatggctgccctttttaatattatata

SEQ ID NO: 52213 - DNA, 50 bp, synthetic construct
  source 1..50: mol_type = other DNA
gattcaaatttacgagacatcaaatgttagatagaatgtttttacagata

SEQ ID NO: 52214 - DNA, 50 bp, synthetic construct
  source 1..50: mol_type = other DNA
aggaatttattaaaaattttgttagctgatatacttttaattaaatatag

SEQ ID NO: 52215 - DNA, 50 bp, synthetic construct
  source 1..50: mol_type = other DNA
tccacatcatatgtaatgtacgagttttcgtatattagatattaacaagg

SEQ ID NO: 52216 - DNA, 50 bp, synthetic construct
  source 1..50: mol_type = other DNA
tatagtagtatataatagagttactaccaactttagtcaattacaaaata

SEQ ID NO: 52217 - DNA, 50 bp, synthetic construct
  source 1..50: mol_type = other DNA
gtttggcggttgagtgcgtctatcttatccggcaaaagaaaggattagac

SEQ ID NO: 52218 - DNA, 50 bp, synthetic construct
  source 1..50: mol_type = other DNA
tagtaaaggtaggataattgatcttcagaggtaatatgtgacctaccaag

SEQ ID NO: 52219 - DNA, 50 bp, synthetic construct
  source 1..50: mol_type = other DNA
taaggagacttatagagaaaataacgtatatttgcttagacttctgctta

SEQ ID NO: 52220 - DNA, 50 bp, synthetic construct
  source 1..50: mol_type = other DNA
ggacgtgaacgacggcgctgtgtccggtcaatgcaagcaacttcacctcc

SEQ ID NO: 52221 - DNA, 50 bp, synthetic construct
  source 1..50: mol_type = other DNA
tgccccgttgcgcagcactttcttaaataccaccgctgcgcaatttggca

SEQ ID NO: 52222 - DNA, 50 bp, synthetic construct
  source 1..50: mol_type = other DNA
ttcatagaacactcatgctaccatgtatattagcaagactgttcgaggtc

SEQ ID NO: 52223 - DNA, 50 bp, synthetic construct
  source 1..50: mol_type = other DNA
acttataactattaaggcggtgaacattcaaaagaataatagaatagcct

SEQ ID NO: 52224 - DNA, 50 bp, synthetic construct
  source 1..50: mol_type = other DNA
aaaacgtgtggtaatgccaccgcctttgccataaccttgaaacaaatacc

SEQ ID NO: 52225 - DNA, 50 bp, synthetic construct
  source 1..50: mol_type = other DNA
aatatagctcaggaaaaagacaaaatgtggcctttagagtgatgtatata

SEQ ID NO: 52226 - DNA, 50 bp, synthetic construct
  source 1..50: mol_type = other DNA
gtgtttttgttattttacaaaggttgaagcttgccaaaaagcaaaataaa

SEQ ID NO: 52227 - DNA, 50 bp, synthetic construct
  source 1..50: mol_type = other DNA
ttttgaattttcgtgtaacgccaagtcgaatcactggcgagaattcaatc

SEQ ID NO: 52228 - DNA, 50 bp, synthetic construct
  source 1..50: mol_type = other DNA
agctttgcttcatcttgtttcaagtatactcgccaacataaaggtacgct

SEQ ID NO: 52229 - DNA, 50 bp, synthetic construct
  source 1..50: mol_type = other DNA
atattgagtggttcatttttgaaataaacttaaaatacacgaatatatta

SEQ ID NO: 52230 - DNA, 50 bp, synthetic construct
  source 1..50: mol_type = other DNA
tacatgcaggtcgtggggcatgcttcggcatgctcggcgacagaatcggg

SEQ ID NO: 52231 - DNA, 50 bp, synthetic construct
  source 1..50: mol_type = other DNA
acgatagtgggcaagggcaaccccatgatattgcccttttttacgctaat

SEQ ID NO: 52232 - DNA, 50 bp, synthetic construct
  source 1..50: mol_type = other DNA
ttcccgaacgacgaggagcggcggaatggaacggattcctctttttcgga

SEQ ID NO: 52233 - DNA, 50 bp, synthetic construct
  source 1..50: mol_type = other DNA
tccaaaatagataatcaccgtattgcaatgtgtagatcagtgatattatg

SEQ ID NO: 52234 - DNA, 50 bp, synthetic construct
  source 1..50: mol_type = other DNA
aagagggtggtcaacctgtgtaaatcgtcgtccagggtggtcaggctgat

SEQ ID NO: 52235 - DNA, 50 bp, synthetic construct
  source 1..50: mol_type = other DNA
gtttccgtctacttggcaaggaggcaacagattgcgcaggagtgtaatca

SEQ ID NO: 52236 - DNA, 50 bp, synthetic construct
  source 1..50: mol_type = other DNA
gctcggcggacgaggccttgaggtgcagcatctcgccagtctcgacgagc

SEQ ID NO: 52237 - DNA, 50 bp, synthetic construct
  source 1..50: mol_type = other DNA
ttttagtgcaaacaaaaaaagctctagagctttatttttatggaccatac

SEQ ID NO: 52238 - DNA, 50 bp, synthetic construct
  source 1..50: mol_type = other DNA
actttctaaattcggcatataacgcggaaaattcaccgcatccagaattt

SEQ ID NO: 52239 - DNA, 50 bp, synthetic construct
  source 1..50: mol_type = other DNA
attacaatattaggtaataagcatcaatgcctgttacctaatattgtcaa

SEQ ID NO: 52240 - DNA, 50 bp, synthetic construct
  source 1..50: mol_type = other DNA
aactcactcctcgtaagaatgtatgttggcataatcatcaggagatagtt

SEQ ID NO: 52241 - DNA, 50 bp, synthetic construct
  source 1..50: mol_type = other DNA
gccgaaatccgagagaacgatatggcccgcgcgcaggctcgtattgacct

SEQ ID NO: 52242 - DNA, 50 bp, synthetic construct
  source 1..50: mol_type = other DNA
agacctggatcaacgcctgctcaatatttttcaggcaaaacaatcattct

SEQ ID NO: 52243 - DNA, 50 bp, synthetic construct
  source 1..50: mol_type = other DNA
aggagatcgaggaggccggcggccatgcccgagaccgtcgtcgaccgcct

SEQ ID NO: 52244 - DNA, 50 bp, synthetic construct
  source 1..50: mol_type = other DNA
tcaattgctatcatttatttggtgttattacaaataccaatcttgaggcg

SEQ ID NO: 52245 - DNA, 50 bp, synthetic construct
  source 1..50: mol_type = other DNA
cccggctgccggacggccgcaaggcgtcaccattccgctatcccggcggg

SEQ ID NO: 52246 - DNA, 50 bp, synthetic construct
  source 1..50: mol_type = other DNA
gtcgacgacgacaaccccggaccgaccgcggcatcctcttcatcgacgac

SEQ ID NO: 52247 - DNA, 50 bp, synthetic construct
  source 1..50: mol_type = other DNA
tttctttttaaatagtttgaaactgcatgatcaaactcttcaaaaagaaa

SEQ ID NO: 52248 - DNA, 50 bp, synthetic construct
  source 1..50: mol_type = other DNA
ttaaaagctctatttagctcatctaatcttttgcttaaagttgctgttta

SEQ ID NO: 52249 - DNA, 50 bp, synthetic construct
  source 1..50: mol_type = other DNA
gaaaggctgtctcttatcgaaaagatcctgaccggatgagagaatattat

SEQ ID NO: 52250 - DNA, 50 bp, synthetic construct
  source 1..50: mol_type = other DNA
taatcacgaatacgataatggctgaaaaaaattaattgaattcatgagac

SEQ ID NO: 52251 - DNA, 50 bp, synthetic construct
  source 1..50: mol_type = other DNA
ttgttcctgtaattctttgacggattgtcgggcgttcattacaggaggaa

SEQ ID NO: 52252 - DNA, 50 bp, synthetic construct
  source 1..50: mol_type = other DNA
ttttaagctttgaagctactcgaccagcgcagtagcgagtagcatttttt

SEQ ID NO: 52253 - DNA, 50 bp, synthetic construct
  source 1..50: mol_type = other DNA
ggccgatgccgctcacctcgcggagtaccgcgcaaggagcgctgacggcc

SEQ ID NO: 52254 - DNA, 50 bp, synthetic construct
  source 1..50: mol_type = other DNA
ttcctccagccggttggccagttcgaggcgaaaccgtaaaactgcggggg

SEQ ID NO: 52255 - DNA, 50 bp, synthetic construct
  source 1..50: mol_type = other DNA
gcggactcccacgccagggcgaggaacctgttcctagcggaacgggtagc

SEQ ID NO: 52256 - DNA, 50 bp, synthetic construct
  source 1..50: mol_type = other DNA
ttataacaaggttatttcttttgtaacgaactttatggtacagcaaataa

SEQ ID NO: 52257 - DNA, 50 bp, synthetic construct
  source 1..50: mol_type = other DNA
attttcgttctgtttaggtgtaattaatttcatcaaacttggtaatttaa

SEQ ID NO: 52258 - DNA, 50 bp, synthetic construct
  source 1..50: mol_type = other DNA
caggtggccttgtccctcccagaaatgactcaggatgaccgctattacat

SEQ ID NO: 52259 - DNA, 50 bp, synthetic construct
  source 1..50: mol_type = other DNA
ttttttttggtcatttgctgctcagattgaaaggaaattatcaaaaaaaa

SEQ ID NO: 52260 - DNA, 50 bp, synthetic construct
  source 1..50: mol_type = other DNA
gtcgtcggtacccatgacggcctcctggacgatagagaggcagcgacgac

SEQ ID NO: 52261 - DNA, 50 bp, synthetic construct
  source 1..50: mol_type = other DNA
ttcgttccccggttttgctttgattgaaaatgtcaaaaaccttcttcgtt

SEQ ID NO: 52262 - DNA, 50 bp, synthetic construct
  source 1..50: mol_type = other DNA
tcactttaacggtaagtcttgttaggttacttcacccctaaaggctgtga

SEQ ID NO: 52263 - DNA, 50 bp, synthetic construct
  source 1..50: mol_type = other DNA
cggtatttactaattgtagcttccatcgtgccgggaattagtatatgcca

SEQ ID NO: 52264 - DNA, 50 bp, synthetic construct
  source 1..50: mol_type = other DNA
agttccctgaaaagagacttcacagatatgaagctgctagtgacatacat

SEQ ID NO: 52265 - DNA, 50 bp, synthetic construct
  source 1..50: mol_type = other DNA
gaagctggtgcgtctaccaattccgctatcagcggaagcgcagcagcttg

SEQ ID NO: 52266 - DNA, 50 bp, synthetic construct
  source 1..50: mol_type = other DNA
tacaggaccgagacccagcatcgtggtggatatgtggtctcgtgcctgtt

SEQ ID NO: 52267 - DNA, 50 bp, synthetic construct
  source 1..50: mol_type = other DNA
cagcgcctcgggccgaaactgggtggtgcgcaggcgaaggtgaggttgct

SEQ ID NO: 52268 - DNA, 50 bp, synthetic construct
  source 1..50: mol_type = other DNA
atcttttttgaatctctgaaacaaatttcttttagttaattcaaaaggat

SEQ ID NO: 52269 - DNA, 50 bp, synthetic construct
  source 1..50: mol_type = other DNA
ccgcagctttcaagacgtcgacaatctcgtccggcaactcgcccgacagg

SEQ ID NO: 52270 - DNA, 50 bp, synthetic construct
  source 1..50: mol_type = other DNA
cgagcagcgcgacctgggcttcatagcagtccggtagctcgtcaggctca

SEQ ID NO: 52271 - DNA, 50 bp, synthetic construct
  source 1..50: mol_type = other DNA
ggttgctccagatgaaccagctccacagagctggtccaggtggtcgccgc

SEQ ID NO: 52272 - DNA, 50 bp, synthetic construct
  source 1..50: mol_type = other DNA
gtgataaactctcatgcaattgattaaaatcttgtcaagccccttgtcaa

SEQ ID NO: 52273 - DNA, 50 bp, synthetic construct
  source 1..50: mol_type = other DNA
aggagattataaagctcactcccattttcgcatcacccttataaggaaac

SEQ ID NO: 52274 - DNA, 50 bp, synthetic construct
  source 1..50: mol_type = other DNA
atttttgtttaatttttatttaaaaagacaaattcaccacggtgaacaat

SEQ ID NO: 52275 - DNA, 50 bp, synthetic construct
  source 1..50: mol_type = other DNA
tagaacaacaatcaatctggtttaaaaaaatggctgtgattcaatctata

SEQ ID NO: 52276 - DNA, 50 bp, synthetic construct
  source 1..50: mol_type = other DNA
gatttatttctaaataatgatctcggaagacatttatgcgggtatcgaat

SEQ ID NO: 52277 - DNA, 50 bp, synthetic construct
  source 1..50: mol_type = other DNA
tatacaattttatatttattaacttaagttaattttaaactctccagaat

SEQ ID NO: 52278 - DNA, 50 bp, synthetic construct
  source 1..50: mol_type = other DNA
aaagaaactcctcatcggcggcggcgccgcctgagtgggcgggtatagca

SEQ ID NO: 52279 - DNA, 50 bp, synthetic construct
  source 1..50: mol_type = other DNA
gtccgaacaccccatgcaaaatccaagtaatagaagtgtaaaaaattttg

SEQ ID NO: 52280 - DNA, 50 bp, synthetic construct
  source 1..50: mol_type = other DNA
attcctttatggatttgcggctatccttaaccataaatccaaaaagaata

SEQ ID NO: 52281 - DNA, 50 bp, synthetic construct
  source 1..50: mol_type = other DNA
aatgagtattacgatatcagttcgtataatttgatatcgcaatatttgac

SEQ ID NO: 52282 - DNA, 50 bp, synthetic construct
  source 1..50: mol_type = other DNA
cttgacatctcgctttacaaagatattgtttggtaaaaaagaaaggtcag

SEQ ID NO: 52283 - DNA, 50 bp, synthetic construct
  source 1..50: mol_type = other DNA
ttacatataaatgattgggttttgaaaaaaacgggcaaatcgtgttttcg

SEQ ID NO: 52284 - DNA, 50 bp, synthetic construct
  source 1..50: mol_type = other DNA
gcttttatctttttttcttctcatgctccggaagattaaaaaaacgggca

SEQ ID NO: 52285 - DNA, 50 bp, synthetic construct
  source 1..50: mol_type = other DNA
cttgtacttctttctcttgaaaagtattttttaagagaaccgtcccggcg

SEQ ID NO: 52286 - DNA, 50 bp, synthetic construct
  source 1..50: mol_type = other DNA
atcttgctcttgtacttctttctcttccggcacagcgatcagcggcagat

SEQ ID NO: 52287 - DNA, 50 bp, synthetic construct
  source 1..50: mol_type = other DNA
cgtccataaagtcgttgtttacagttcgataagacggtttactatggctg

SEQ ID NO: 52288 - DNA, 50 bp, synthetic construct
  source 1..50: mol_type = other DNA
aacatctaattgagtataataattttcattaccatactgccgaagacggc

SEQ ID NO: 52289 - DNA, 50 bp, synthetic construct
  source 1..50: mol_type = other DNA
cgaatcccgcgtatttaggggctttttcttcctattataatgtggaatta

SEQ ID NO: 52290 - DNA, 50 bp, synthetic construct
  source 1..50: mol_type = other DNA
tgtagatgcggagcagctcgcgctcgagctcgagcatgtccgcggcgatg

SEQ ID NO: 52291 - DNA, 50 bp, synthetic construct
  source 1..50: mol_type = other DNA
tttacatttattatatgtaattaatagaacttacaaaaaataaatagatt

SEQ ID NO: 52292 - DNA, 50 bp, synthetic construct
  source 1..50: mol_type = other DNA
attttaaattagggatatgtttattaataaattaaaagatattattcaag

SEQ ID NO: 52293 - DNA, 50 bp, synthetic construct
  source 1..50: mol_type = other DNA
gtataattttatcatgtagaaatattatattttaaaatgattaattatac

SEQ ID NO: 52294 - DNA, 50 bp, synthetic construct
  source 1..50: mol_type = other DNA
cattatgataacttttgatttctttaaagggatgggaagaaatcaagaaa

SEQ ID NO: 52295 - DNA, 50 bp, synthetic construct
  source 1..50: mol_type = other DNA
ctgcctgacactttttgggcttattatccgccccaaacggagtcaaccag

SEQ ID NO: 52296 - DNA, 50 bp, synthetic construct
  source 1..50: mol_type = other DNA
aaagtggtataatttcgttgttcggacgatcagggtgtttaagccatact

SEQ ID NO: 52297 - DNA, 50 bp, synthetic construct
  source 1..50: mol_type = other DNA
gtcatggcaggcacctcgctttttttcaaaaacgtgcagcctgcatccat

SEQ ID NO: 52298 - DNA, 50 bp, synthetic construct
  source 1..50: mol_type = other DNA
ttcttttctctgctcatttttgcttaagcaccctatattatagcagagaa

SEQ ID NO: 52299 - DNA, 50 bp, synthetic construct
  source 1..50: mol_type = other DNA
ggcagacaaattgatattgcagttggaactccgggataaactttgctggg

SEQ ID NO: 52300 - DNA, 50 bp, synthetic construct
  source 1..50: mol_type = other DNA
tcttaaataaatacaataagccatagtgcaagcactgtatatattgatgg

SEQ ID NO: 52301 - DNA, 50 bp, synthetic construct
  source 1..50: mol_type = other DNA
tataccaatgagttaatagccacccgggcaaatcgtgtttttgcacgata

SEQ ID NO: 52302 - DNA, 50 bp, synthetic construct
  source 1..50: mol_type = other DNA
cagtcacacaggcaatgcttgtatatctacaagataatagcctgtgcagg

SEQ ID NO: 52303 - DNA, 50 bp, synthetic construct
  source 1..50: mol_type = other DNA
cggtctgaagtatgtactattcataaattacatcattctgtttcacgcat

SEQ ID NO: 52304 - DNA, 50 bp, synthetic construct
  source 1..50: mol_type = other DNA
taattccacattataataggaagaaaaagcccctaaatacgcgggattcg

SEQ ID NO: 52305 - DNA, 50 bp, synthetic construct
  source 1..50: mol_type = other DNA
gttcagccatgtagcaatcgcagaaaacacaggttcatattttgcacaaa

SEQ ID NO: 52306 - DNA, 50 bp, synthetic construct
  source 1..50: mol_type = other DNA
tccaagacgagcttaaaattagacaacgataattgaaagaggtacaaata

SEQ ID NO: 52307 - DNA, 50 bp, synthetic construct
  source 1..50: mol_type = other DNA
taagtggctaattaagccacttttttaaacatacaatttatagaaagaga

SEQ ID NO: 52308 - DNA, 50 bp, synthetic construct
  source 1..50: mol_type = other DNA
ctgctcgcctttgatttttttgatttctataaaaaatcaataattaacat

SEQ ID NO: 52309 - DNA, 50 bp, synthetic construct
  source 1..50: mol_type = other DNA
cacaattgtcaagttgtttttggcattcagaaaacaaatttctagttgtg

SEQ ID NO: 52310 - DNA, 50 bp, synthetic construct
  source 1..50: mol_type = other DNA
ttctgtttttttgtgcaattttatttatagtgttgcgttgtaaaattata

SEQ ID NO: 52311 - DNA, 50 bp, synthetic construct
  source 1..50: mol_type = other DNA
tagaaatttaatgaataaaaatgtgccagttatgcaaactggaatttctg

SEQ ID NO: 52312 - DNA, 50 bp, synthetic construct
  source 1..50: mol_type = other DNA
tctattgcttctttatcacacatcaacatgaatggatctcaacatatctg

SEQ ID NO: 52313 - DNA, 50 bp, synthetic construct
  source 1..50: mol_type = other DNA
gtacatcataaatatgagttttacgatcaaaaaagatatttatattcaga

SEQ ID NO: 52314 - DNA, 50 bp, synthetic construct
  source 1..50: mol_type = other DNA
caaaaagaatttcacagaaaatttgtaaccagtaccacaaatttgcatga

SEQ ID NO: 52315 - DNA, 50 bp, synthetic construct
  source 1..50: mol_type = other DNA
gtttcacggttaaaaatcctccttctccggttcctttttgaccgcctttt

SEQ ID NO: 52316 - DNA, 50 bp, synthetic construct
  source 1..50: mol_type = other DNA
gacggcaacccgttggcaagatggactcgaaaaatcaacgtccagaaatg

SEQ ID NO: 52317 - DNA, 50 bp, synthetic construct
  source 1..50: mol_type = other DNA
ggcgccctcatcgatgtcggcgcggccgcgccgccggcgagtaggcctct

SEQ ID NO: 52318 - DNA, 50 bp, synthetic construct
  source 1..50: mol_type = other DNA
ggtgcggatggcacagtcacgtaccggcacttagctcttgtgtcggatag

SEQ ID NO: 52319 - DNA, 50 bp, synthetic construct
  source 1..50: mol_type = other DNA
agtattcctttaaaaagaaaaatctagtttttctaataaaatagaatggc

SEQ ID NO: 52320 - DNA, 50 bp, synthetic construct
  source 1..50: mol_type = other DNA
tgcaaatgattattaaatatagtaaataacataaatataatatattgaat

SEQ ID NO: 52321 - DNA, 50 bp, synthetic construct
  source 1..50: mol_type = other DNA
aatatcctccttcggtggttggtcagccgcagacaccggagatggttctg

SEQ ID NO: 52322 - DNA, 50 bp, synthetic construct
  source 1..50: mol_type = other DNA
atacttttccttttgttaaatccatagtagtataacaatcacaaaaaaat

SEQ ID NO: 52323 - DNA, 50 bp, synthetic construct
  source 1..50: mol_type = other DNA
gcgacgataacgctgtccgcgaccatggacgcacaggaggttatgcacat

SEQ ID NO: 52324 - DNA, 50 bp, synthetic construct
  source 1..50: mol_type = other DNA
atccggctcaaataaaagaaaatgatcatgaggcgataattgagccggaa

SEQ ID NO: 52325 - DNA, 50 bp, synthetic construct
  source 1..50: mol_type = other DNA
gattgcaactctttgttgttcaccgccgggataacgaaaaaattgaaatc

SEQ ID NO: 52326 - DNA, 50 bp, synthetic construct
  source 1..50: mol_type = other DNA
ggtaaagtgccttatgctgattatgtaaattcaatctattaggctttata

SEQ ID NO: 52327 - DNA, 50 bp, synthetic construct
  source 1..50: mol_type = other DNA
tgaatgtccagtaaaatatttatccccacgattattttaccgtggggttg

SEQ ID NO: 52328 - DNA, 50 bp, synthetic construct
  source 1..50: mol_type = other DNA
ctccgtatatattatgtaaaaaagtactactttacgaaatttacctttgc

SEQ ID NO: 52329 - DNA, 50 bp, synthetic construct
  source 1..50: mol_type = other DNA
catttccaaaagaattgggataaagaataatcccgtttcttttggaaata

SEQ ID NO: 52330 - DNA, 50 bp, synthetic construct
  source 1..50: mol_type = other DNA
aatggaaaaacaattataaaccatgaatggtggcatcttgtttttataca

SEQ ID NO: 52331 - DNA, 50 bp, synthetic construct
  source 1..50: mol_type = other DNA
ctgttcttttgcagcttccagttctttcagtggcacctgcacaagaggtg

SEQ ID NO: 52332 - DNA, 50 bp, synthetic construct
  source 1..50: mol_type = other DNA
ccgctcctgccatcccggaagaaagctctggtatcggatagggcaggcgg

SEQ ID NO: 52333 - DNA, 50 bp, synthetic construct
  source 1..50: mol_type = other DNA
ctattttttatgaaattttcggttccttaagaaaaacatcgaagaataag

SEQ ID NO: 52334 - DNA, 50 bp, synthetic construct
  source 1..50: mol_type = other DNA
aaaaatcagatagaaatggtgttacagctatcattatcttctggaggttt

SEQ ID NO: 52335 - DNA, 50 bp, synthetic construct
  source 1..50: mol_type = other DNA
agtcaattcctcggccaacaaaaaatttctttttgatggaggaattatga

SEQ ID NO: 52336 - DNA, 50 bp, synthetic construct
  source 1..50: mol_type = other DNA
tcggccaacaaaaaatgcatcatgtgcattgtatatactttcttttcctt

SEQ ID NO: 52337 - DNA, 50 bp, synthetic construct
  source 1..50: mol_type = other DNA
ccttgctgctttttttgcatttcagcatgaaaagaaaaaaagataaaagc

SEQ ID NO: 52338 - DNA, 50 bp, synthetic construct
  source 1..50: mol_type = other DNA
aacacactggttctctgctagtatatattgtatcatcttcggagcggctg

SEQ ID NO: 52339 - DNA, 50 bp, synthetic construct
  source 1..50: mol_type = other DNA
ttgactgctgtaacataaatacctcctttttttgttcttcaggcagttcg

SEQ ID NO: 52340 - DNA, 50 bp, synthetic construct
  source 1..50: mol_type = other DNA
tgtacaccgtggtgggcgtggtgtgcaacgcaccggcggcttgctgttta

SEQ ID NO: 52341 - DNA, 50 bp, synthetic construct
  source 1..50: mol_type = other DNA
ccgacgaggacggcaatgagtttgaggttacttcatgccgttctcgtagg

SEQ ID NO: 52342 - DNA, 50 bp, synthetic construct
  source 1..50: mol_type = other DNA
ggaggaggaacgactcactgttcaaaatagcggtagggtgttcctgctgc

SEQ ID NO: 52343 - DNA, 50 bp, synthetic construct
  source 1..50: mol_type = other DNA
gggtcatccgtccgaaatactgccctgggaacgcttcgaacgaacggtct

SEQ ID NO: 52344 - DNA, 50 bp, synthetic construct
  source 1..50: mol_type = other DNA
ggtcatcccgcccaccattcagcccaattcctatggcggccggactgacc

SEQ ID NO: 52345 - DNA, 50 bp, synthetic construct
  source 1..50: mol_type = other DNA
ccgcgccatcccctacaacttctacgccggagatgaaggaaatcgcccgg

SEQ ID NO: 52346 - DNA, 50 bp, synthetic construct
  source 1..50: mol_type = other DNA
ttcaccacttaaaatcatctcctcaagaggtaatggtactggtaacagaa

SEQ ID NO: 52347 - DNA, 50 bp, synthetic construct
  source 1..50: mol_type = other DNA
aagaatcttaccgactaaagaagtgatcttctttatccaactaccgtctt

SEQ ID NO: 52348 - DNA, 50 bp, synthetic construct
  source 1..50: mol_type = other DNA
ctttccgtcctccagtgtcagtaaaacccgctatgctccagcacatagtc

SEQ ID NO: 52349 - DNA, 50 bp, synthetic construct
  source 1..50: mol_type = other DNA
tattttgatttcatacgttttattctcatagaaagtgagagtcaataatg

SEQ ID NO: 52350 - DNA, 50 bp, synthetic construct
  source 1..50: mol_type = other DNA
cttgataaaatcattctcctgaaagctttctggcacttgattttattttc

SEQ ID NO: 52351 - DNA, 50 bp, synthetic construct
  source 1..50: mol_type = other DNA
taaaaacatttcagtggttaaatttaaaagttaaagttgataaaaggctt

SEQ ID NO: 52352 - DNA, 50 bp, synthetic construct
  source 1..50: mol_type = other DNA
ttcaaaaaatggtgttcgtccgcatatgctatgaaacatggttttacgaa

SEQ ID NO: 52353 - DNA, 50 bp, synthetic construct
  source 1..50: mol_type = other DNA
accccttgtacaccgatgttttcataacaaattaggggtgtatagaatta

SEQ ID NO: 52354 - DNA, 50 bp, synthetic construct
  source 1..50: mol_type = other DNA
cagaaaaaaatttccgcgtatacggaaatgcctccttttattattttcat

SEQ ID NO: 52355 - DNA, 50 bp, synthetic construct
  source 1..50: mol_type = other DNA
acattttttgcccaacaatatctttaaaactattggtgcgtaaaaccgtt

SEQ ID NO: 52356 - DNA, 50 bp, synthetic construct
  source 1..50: mol_type = other DNA
atttctgtattagctggacggaaattactatcagttactactacaaaaag

SEQ ID NO: 52357 - DNA, 50 bp, synthetic construct
  source 1..50: mol_type = other DNA
tataaagcagaatagagagaaaaagattatttatactatgctgctttatt

SEQ ID NO: 52358 - DNA, 50 bp, synthetic construct
  source 1..50: mol_type = other DNA
tctttcttttaccagccctttttaggtacaaacaagataaaatagaaatg

SEQ ID NO: 52359 - DNA, 50 bp, synthetic construct
  source 1..50: mol_type = other DNA
cagtctgacacggtcgtcctttccgtagaacttcataccgtgtttgactg

SEQ ID NO: 52360 - DNA, 50 bp, synthetic construct
  source 1..50: mol_type = other DNA
atgtaaaaggacataatatcatcgtgtgattcaattaccatatgttggtt

SEQ ID NO: 52361 - DNA, 50 bp, synthetic construct
  source 1..50: mol_type = other DNA
ctgcgctcggtgtaggtgagcacgctgatagccatcgttgctgagcacga

SEQ ID NO: 52362 - DNA, 50 bp, synthetic construct
  source 1..50: mol_type = other DNA
ctgtcacacgacggcggggagcacccggggaacggctcgtcgtcgaccca

SEQ ID NO: 52363 - DNA, 50 bp, synthetic construct
  source 1..50: mol_type = other DNA
ctcgaaaattgttcgaatgtctctcgggggacagggcctacctggttgat

SEQ ID NO: 52364 - DNA, 50 bp, synthetic construct
  source 1..50: mol_type = other DNA
gcctaccatatcgcccaaaattgctcctaattttttcctcctctgtagaa

SEQ ID NO: 52365 - DNA, 50 bp, synthetic construct
  source 1..50: mol_type = other DNA
gacgcatttgtccatactgtatgcaggagcccaatatggaatttatcaga

SEQ ID NO: 52366 - DNA, 50 bp, synthetic construct
  source 1..50: mol_type = other DNA
gctgctgcgcgctgcatgaagtacccttactgccgtcaccgttacgcgct

SEQ ID NO: 52367 - DNA, 50 bp, synthetic construct
  source 1..50: mol_type = other DNA
tatattcatgctgaaatatatgctgaaaagagggatagcgcatggataag

SEQ ID NO: 52368 - DNA, 50 bp, synthetic construct
  source 1..50: mol_type = other DNA
taatgaaataggttgtttgcatcagaaaaagcaagcgcgctatcagagtc

SEQ ID NO: 52369 - DNA, 50 bp, synthetic construct
  source 1..50: mol_type = other DNA
agaagatgtgcatgcgaatgcttcttgatgcattaatttgcaggtctttt

SEQ ID NO: 52370 - DNA, 50 bp, synthetic construct
  source 1..50: mol_type = other DNA
atataccacaacttaggtgagattgcaatgctgacacccttgttcaggcc

SEQ ID NO: 52371 - DNA, 50 bp, synthetic construct
  source 1..50: mol_type = other DNA
cgtaatccagcagatagcccgggtaagccccttgcacctccattttattt

SEQ ID NO: 52372 - DNA, 50 bp, synthetic construct
  source 1..50: mol_type = other DNA
acagaagataagtacaacacttataaatcaagagtgttcagattttccac

SEQ ID NO: 52373 - DNA, 50 bp, synthetic construct
  source 1..50: mol_type = other DNA
atttcctcatgatccacctcatctttatttaagagatgtcgtgtgggctg

SEQ ID NO: 52374 - DNA, 50 bp, synthetic construct
  source 1..50: mol_type = other DNA
aaccggcatggtgatatcttaaagttttttaagatcggcataatccggtt

SEQ ID NO: 52375 - DNA, 50 bp, synthetic construct
  source 1..50: mol_type = other DNA
ccggtgaggagcgcgaacgggtcggttgcatcgttcgatgacgacgacct

SEQ ID NO: 52376 - DNA, 50 bp, synthetic construct
  source 1..50: mol_type = other DNA
atttataacaaatatttgtcatttccaaatcaccaatatttgcaagcaat

SEQ ID NO: 52377 - DNA, 50 bp, synthetic construct
  source 1..50: mol_type = other DNA
ctcatgcctcgactccttcctgcgccggctgcatgtggtcggcggacgca

SEQ ID NO: 52378 - DNA, 50 bp, synthetic construct
  source 1..50: mol_type = other DNA
gggtgcttatttccaatatcagaagattctgattgctttcataaaaacgc

SEQ ID NO: 52379 - DNA, 50 bp, synthetic construct
  source 1..50: mol_type = other DNA
gaggtaaccgtcctcaacataaactttcgtgcaccgagtacggataaatc

SEQ ID NO: 52380 - DNA, 50 bp, synthetic construct
  source 1..50: mol_type = other DNA
atggggatcgtcgtgggggtccagccgaatgggcccacgacggccccacc

SEQ ID NO: 52381 - DNA, 50 bp, synthetic construct
  source 1..50: mol_type = other DNA
cactgcaccagcaccgggcaggcccggtcattcccattgctcggccatct

SEQ ID NO: 52382 - DNA, 50 bp, synthetic construct
  source 1..50: mol_type = other DNA
ccttctcgatgacgcaggagtttatgctagctgctgcgtctgagcgctag

SEQ ID NO: 52383 - DNA, 50 bp, synthetic construct
  source 1..50: mol_type = other DNA
tatccattttctcgatcccagataaatatccggcgaggattaaaataaat

SEQ ID NO: 52384 - DNA, 50 bp, synthetic construct
  source 1..50: mol_type = other DNA
aatccttttaatttcttccttttttaaacaaaaagctggttaaaaagaaa

SEQ ID NO: 52385 - DNA, 50 bp, synthetic construct
  source 1..50: mol_type = other DNA
gaataactgtaatgtttttgcccatatttgcaaaaccaccactaccaatt

SEQ ID NO: 52386 - DNA, 50 bp, synthetic construct
  source 1..50: mol_type = other DNA
gggaagataagtcaagcttttcgcaatcgaaacgcaacatgaatctgagt

SEQ ID NO: 52387 - DNA, 50 bp, synthetic construct
  source 1..50: mol_type = other DNA
ggtgctaataattttgttcagataattatcatgaaaaatttattgttaaa

SEQ ID NO: 52388 - DNA, 50 bp, synthetic construct
  source 1..50: mol_type = other DNA
ctctatcttttgcctcaattataaaataatattcaagagaaaaagtatag

SEQ ID NO: 52389 - DNA, 50 bp, synthetic construct
  source 1..50: mol_type = other DNA
acgaagattacgctctttgattggtttcaaataaagactgtatttttaat

SEQ ID NO: 52390 - DNA, 50 bp, synthetic construct
  source 1..50: mol_type = other DNA
ctcatattcaatacctaaaatgatgtgattctcttggtattgaagaggct

SEQ ID NO: 52391 - DNA, 50 bp, synthetic construct
  source 1..50: mol_type = other DNA
tgtttgcaaaagatatgcataacaaatgagatgcatacctgttgcaaaca

SEQ ID NO: 52392 - DNA, 50 bp, synthetic construct
  source 1..50: mol_type = other DNA
tggggccctggtcgcgggtcgcgctcccgcgagaaagagacgccgatgaa

SEQ ID NO: 52393 - DNA, 50 bp, synthetic construct
  source 1..50: mol_type = other DNA
atttttaattatattatttaaggtttctttcttcctatataataaaaaaa

SEQ ID NO: 52394 - DNA, 50 bp, synthetic construct
  source 1..50: mol_type = other DNA
ctagattatcaaatacttcagcaatgatgctttaggattaaatggggtaa

SEQ ID NO: 52395 - DNA, 50 bp, synthetic construct
  source 1..50: mol_type = other DNA
ataatttaattaaagtaccgcctgtgagattcatgatttaattataccac

SEQ ID NO: 52396 - DNA, 50 bp, synthetic construct
  source 1..50: mol_type = other DNA
gtggtcacatattcgctctaaaagcccctttgactataattgtaccgcaa

SEQ ID NO: 52397 - DNA, 50 bp, synthetic construct
  source 1..50: mol_type = other DNA
gcaaacacttggaatattcatgatatttcacacattctccattatcaaaa

SEQ ID NO: 52398 - DNA, 50 bp, synthetic construct
  source 1..50: mol_type = other DNA
tcaaaaaaatattattgtttcaggtttgctggccagatatcaggcattga

SEQ ID NO: 52399 - DNA, 50 bp, synthetic construct
  source 1..50: mol_type = other DNA
cgaacggtttataaatttcttcccgtaggaagaatggaagggcagaatca

SEQ ID NO: 52400 - DNA, 50 bp, synthetic construct
  source 1..50: mol_type = other DNA
tagcaaaatttgtaccggaataaccggcgtatcgggcgtgagctttgaac

SEQ ID NO: 52401 - DNA, 50 bp, synthetic construct
  source 1..50: mol_type = other DNA
agaaaaataagccaagggttcaccgcgatcgtttctatgctcattttgtc

SEQ ID NO: 52402 - DNA, 50 bp, synthetic construct
  source 1..50: mol_type = other DNA
tgggatttggaatagcttttgaaatttttgagttcctatgcgccttgcct

SEQ ID NO: 52403 - DNA, 50 bp, synthetic construct
  source 1..50: mol_type = other DNA
gcggattcaagagtttgttatggataagtattataccgaactgatacaaa

SEQ ID NO: 52404 - DNA, 50 bp, synthetic construct
  source 1..50: mol_type = other DNA
aaacaaaacagccagtcggcttttttgaagttagaaacagcaggtagtct

SEQ ID NO: 52405 - DNA, 50 bp, synthetic construct
  source 1..50: mol_type = other DNA
tacaagggtcgtcgtcggcctgcccggcgcaggcaacgtcgaccaacgta

SEQ ID NO: 52406 - DNA, 50 bp, synthetic construct
  source 1..50: mol_type = other DNA
tctgtatcgagttcttttttcaccaacaacaaaaacgaaataccacatat

SEQ ID NO: 52407 - DNA, 50 bp, synthetic construct
  source 1..50: mol_type = other DNA
ctttatgctgcaggaagtccctatagaatgggcagacctgcagcatctgg

SEQ ID NO: 52408 - DNA, 50 bp, synthetic construct
  source 1..50: mol_type = other DNA
tggcgcgagcagtgccctgatctgatcaatatcaatacaagcaacagtca

SEQ ID NO: 52409 - DNA, 50 bp, synthetic construct
  source 1..50: mol_type = other DNA
atgcctattgggacatgtcgccagggctacagacgtgccacaactcccgc

SEQ ID NO: 52410 - DNA, 50 bp, synthetic construct
  source 1..50: mol_type = other DNA
cgtgtagagcacccagagcgagagcaatttctctctggatgaatggcaac

SEQ ID NO: 52411 - DNA, 50 bp, synthetic construct
  source 1..50: mol_type = other DNA
gttttacaacattactctgaaatttcaaatacagataaatgttgtaaaaa

SEQ ID NO: 52412 - DNA, 50 bp, synthetic construct
  source 1..50: mol_type = other DNA
ttgtttagggttcagggaaatgacaacagtatgtcccttacgtcaaacaa

SEQ ID NO: 52413 - DNA, 50 bp, synthetic construct
  source 1..50: mol_type = other DNA
tttttactgaaaaagccttattatgagggggagagcatttgcagaaaaaa

SEQ ID NO: 52414 - DNA, 50 bp, synthetic construct
  source 1..50: mol_type = other DNA
gatcacccgggttaacgaacgatttaaattccccggtaagccgcaacact

SEQ ID NO: 52415 - DNA, 50 bp, synthetic construct
  source 1..50: mol_type = other DNA
tgtgttgtttatcaacctgaattttatgaacggattgggacaacaacgca

SEQ ID NO: 52416 - DNA, 50 bp, synthetic construct
  source 1..50: mol_type = other DNA
tctttctcatctatgccgaacacgaccgtttttacagtagatatgtttca

SEQ ID NO: 52417 - DNA, 50 bp, synthetic construct
  source 1..50: mol_type = other DNA
agtatagattttatagcttaagggcaccctaacgaaataaaccctatact

SEQ ID NO: 52418 - DNA, 50 bp, synthetic construct
  source 1..50: mol_type = other DNA
cctgagacgggcaagcgcgtgagccgctgcgcgccgtgaccacgataagg

SEQ ID NO: 52419 - DNA, 50 bp, synthetic construct
  source 1..50: mol_type = other DNA
atacatacctcacgtattgttgagaaatcaacacagcggccggcgggaat

SEQ ID NO: 52420 - DNA, 50 bp, synthetic construct
  source 1..50: mol_type = other DNA
ctaaaaaagcaatgtcaaatacatcatagtgaccgactatgcttatttca

SEQ ID NO: 52421 - DNA, 50 bp, synthetic construct
  source 1..50: mol_type = other DNA
tgccgagtggcctgagcttgccattcgacgcaagcccaggtgctgcacca

SEQ ID NO: 52422 - DNA, 50 bp, synthetic construct
  source 1..50: mol_type = other DNA
tcggtgttgccgcagtagttgcaccaccggatctggtgcagcggcacttc

SEQ ID NO: 52423 - DNA, 50 bp, synthetic construct
  source 1..50: mol_type = other DNA
gccgatctcgcgcgtgagctgggcatgcccgtctcacggttaacgcggcg

SEQ ID NO: 52424 - DNA, 50 bp, synthetic construct
  source 1..50: mol_type = other DNA
tttattaaacaaaatgtcccgattttagcgtagttcttcaacgggataaa

SEQ ID NO: 52425 - DNA, 50 bp, synthetic construct
  source 1..50: mol_type = other DNA
tggaagtggcacaaaaacagcttgcaatgtctgattatctaatgtatttg

SEQ ID NO: 52426 - DNA, 50 bp, synthetic construct
  source 1..50: mol_type = other DNA
ttttatcaaacgatcaaatattacaatagataataaatcgtatttcaaaa

SEQ ID NO: 52427 - DNA, 50 bp, synthetic construct
  source 1..50: mol_type = other DNA
agcttcaaaagttccaaaaccattaacctggttctcatagcttgatagct

SEQ ID NO: 52428 - DNA, 50 bp, synthetic construct
  source 1..50: mol_type = other DNA
tattctgtaaggaatgcggaggtctagacagcatttcaactagaaaaagc

SEQ ID NO: 52429 - DNA, 50 bp, synthetic construct
  source 1..50: mol_type = other DNA
tttattatctattatgattagtgtagaaaacgatacaagtcgagcagaag

SEQ ID NO: 52430 - DNA, 50 bp, synthetic construct
  source 1..50: mol_type = other DNA
atgtttcggctatgattcagagagatctcaatgaactgtaacctcaccat

SEQ ID NO: 52431 - DNA, 50 bp, synthetic construct
  source 1..50: mol_type = other DNA
ctgatggggtcacaataccaatcatgtgaagggtattttacccttgtcgt

SEQ ID NO: 52432 - DNA, 50 bp, synthetic construct
  source 1..50: mol_type = other DNA
cttcgggataggctcggcaatcacagttgaatgccgagggcctcctgctc

SEQ ID NO: 52433 - DNA, 50 bp, synthetic construct
  source 1..50: mol_type = other DNA
cttttactcttaaaatacgtaatgtagaccacgcgattttttcgtaatta

SEQ ID NO: 52434 - DNA, 50 bp, synthetic construct
  source 1..50: mol_type = other DNA
tatttttaaatcattaataattggtatggggtatggcccatttatatcac

SEQ ID NO: 52435 - DNA, 50 bp, synthetic construct
  source 1..50: mol_type = other DNA
tgtttcacctcattatttttggtaaataccaagaatgacattatccaaca

SEQ ID NO: 52436 - DNA, 50 bp, synthetic construct
  source 1..50: mol_type = other DNA
cccagacaggaatggtgcttaacgagcttttagagtgatgtatgtaatgg

SEQ ID NO: 52437 - DNA, 50 bp, synthetic construct
  source 1..50: mol_type = other DNA
aaatggaaatatgaaaaccagaagtacttctggttttgattacgtaattg

SEQ ID NO: 52438 - DNA, 50 bp, synthetic construct
  source 1..50: mol_type = other DNA
ctccttccttattttcttcatgcgatctcattaagaaatcacgcaatgat

SEQ ID NO: 52439 - DNA, 50 bp, synthetic construct
  source 1..50: mol_type = other DNA
aactatcacctccacccatatacatcactatatggaaacactagatttat

SEQ ID NO: 52440 - DNA, 50 bp, synthetic construct
  source 1..50: mol_type = other DNA
ttactagcagcttcatatcttcggacattagtctttgaaaatgctagtat

SEQ ID NO: 52441 - DNA, 50 bp, synthetic construct
  source 1..50: mol_type = other DNA
ctacgatcggaattgctgttccaatattgatacatcaagtttctagagct

SEQ ID NO: 52442 - DNA, 50 bp, synthetic construct
  source 1..50: mol_type = other DNA
gcgtacttttttccataaaagcgaaggtgatttaattgggtaaagtaaga

SEQ ID NO: 52443 - DNA, 50 bp, synthetic construct
  source 1..50: mol_type = other DNA
ctcctatgagactggtaactatgaaaccatagctcaggacgcttcgttca

SEQ ID NO: 52444 - DNA, 50 bp, synthetic construct
  source 1..50: mol_type = other DNA
acgctcctcatggtgataaactcccatgaaattacgcagatgatttgctg

SEQ ID NO: 52445 - DNA, 50 bp, synthetic construct
  source 1..50: mol_type = other DNA
gtagtagagatttagtattttttgtgtaaaagcaggtgatacactactaa

SEQ ID NO: 52446 - DNA, 50 bp, synthetic construct
  source 1..50: mol_type = other DNA
atggtgataaactcccatgcaattgattttgcagaagtgaaggtcaccag

SEQ ID NO: 52447 - DNA, 50 bp, synthetic construct
  source 1..50: mol_type = other DNA
cgccgagcgggaagcgcagatagtcggcaggctcggcttgacgctcggcc

SEQ ID NO: 52448 - DNA, 50 bp, synthetic construct
  source 1..50: mol_type = other DNA
tccccggccgtgcttcattatccatccagcgcctgccgctcgtcgcggct

SEQ ID NO: 52449 - DNA, 50 bp, synthetic construct
  source 1..50: mol_type = other DNA
tcgaacgcaatctggaacatgtccgccggtgagttcgattcactgttcga

SEQ ID NO: 52450 - DNA, 50 bp, synthetic construct
  source 1..50: mol_type = other DNA
taaaatcaatattgttcaatatcatcacatgtgcccttatgcgcgtttcc

SEQ ID NO: 52451 - DNA, 50 bp, synthetic construct
  source 1..50: mol_type = other DNA
gttcacctcacctaataacccctagattgaattaggttattggggtgagg

SEQ ID NO: 52452 - DNA, 50 bp, synthetic construct
  source 1..50: mol_type = other DNA
gattatcatttaaagatgaacttataaggttacagagttaactgtgaaga

SEQ ID NO: 52453 - DNA, 50 bp, synthetic construct
  source 1..50: mol_type = other DNA
taaaaactagccaaaagaaaaagctagctttgctatacccaaaggagcgt

SEQ ID NO: 52454 - DNA, 50 bp, synthetic construct
  source 1..50: mol_type = other DNA
aaatgaaccattttttcgtcttgaatataggagggaatcatgttgcggtt

SEQ ID NO: 52455 - DNA, 50 bp, synthetic construct
  source 1..50: mol_type = other DNA
cggtgatgcccttctacaaaaaacatcgttgatatataagggtttcagag

SEQ ID NO: 52456 - DNA, 50 bp, synthetic construct
  source 1..50: mol_type = other DNA
gcgacttattgagaaagtaacgatataggcttacttcatttataaagggg

SEQ ID NO: 52457 - DNA, 50 bp, synthetic construct
  source 1..50: mol_type = other DNA
cgcgccattgcccggatcatgctcaagaattcaacccatacagtggacaa

SEQ ID NO: 52458 - DNA, 50 bp, synthetic construct
  source 1..50: mol_type = other DNA
ctttagatggtgtatttaaacgtgtcaaggtctaaatacactatgagaac

SEQ ID NO: 52459 - DNA, 50 bp, synthetic construct
  source 1..50: mol_type = other DNA
ctacgaggactactctaacgggattatgcccattcctgtagatgaaatag

SEQ ID NO: 52460 - DNA, 50 bp, synthetic construct
  source 1..50: mol_type = other DNA
gctttctgagaggattttagaggttaatctctaagttttattcacaatgc

SEQ ID NO: 52461 - DNA, 50 bp, synthetic construct
  source 1..50: mol_type = other DNA
atttccaaacaaaaacgcccctaccgatttaggccgcttaaattccaaat

SEQ ID NO: 52462 - DNA, 50 bp, synthetic construct
  source 1..50: mol_type = other DNA
ctcacggtgataaactcccatgcaattgcgtggattttatatacttttgc

SEQ ID NO: 52463 - DNA, 50 bp, synthetic construct
  source 1..50: mol_type = other DNA
ctgttgctgatggtgctggcgaatctaggcatcagttttgaggtgaacaa

SEQ ID NO: 52464 - DNA, 50 bp, synthetic construct
  source 1..50: mol_type = other DNA
gattcactgagtactttttaagctttcagctaaaccattgagtgtgaatc

SEQ ID NO: 52465 - DNA, 50 bp, synthetic construct
  source 1..50: mol_type = other DNA
ggccacggctgtcagactgtggcgcgaaagccaggttgacaggccccgcc

SEQ ID NO: 52466 - DNA, 50 bp, synthetic construct
  source 1..50: mol_type = other DNA
gggcaagggagcgcgcgagcgcgagcggagcagcgttacgtcatcggcaa

SEQ ID NO: 52467 - DNA, 50 bp, synthetic construct
  source 1..50: mol_type = other DNA
cctatatttgcttgcgcaggtataattgctaaaaagcaatcaaacacaca

SEQ ID NO: 52468 - DNA, 50 bp, synthetic construct
  source 1..50: mol_type = other DNA
ctggcccaatgcgagccagctctcgactcagccagggcggtgcgggccag

SEQ ID NO: 52469 - DNA, 50 bp, synthetic construct
  source 1..50: mol_type = other DNA
gtatcactacaattaacggttatgcttatacaaacaaaaattagaaggtt

SEQ ID NO: 52470 - DNA, 50 bp, synthetic construct
  source 1..50: mol_type = other DNA
tattccacatattccatataaatcaatacggatattgaataatggcattg

SEQ ID NO: 52471 - DNA, 50 bp, synthetic construct
  source 1..50: mol_type = other DNA
taacaatattatctaacgttgttcacaataccagatagtcaatattgtca

SEQ ID NO: 52472 - DNA, 50 bp, synthetic construct
  source 1..50: mol_type = other DNA
atgcgtgttttaaaacacatatcatttgtaatatgtattgaagcacacaa

SEQ ID NO: 52473 - DNA, 50 bp, synthetic construct
  source 1..50: mol_type = other DNA
cgcgcggggtggggtggagatagcggcctatatccacgagcccctgcgcc

SEQ ID NO: 52474 - DNA, 50 bp, synthetic construct
  source 1..50: mol_type = other DNA
cctaggcattatacagcttttaccttcacgaaaatcgcaaaatgccacta

SEQ ID NO: 52475 - DNA, 50 bp, synthetic construct
  source 1..50: mol_type = other DNA
caaatacaacatgcccgggcgtatgcgcagtgccgcgcaagagtggtttg

SEQ ID NO: 52476 - DNA, 50 bp, synthetic construct
  source 1..50: mol_type = other DNA
atacgactattcgtactttctaaactattagaaaactttttcagtaatta

SEQ ID NO: 52477 - DNA, 50 bp, synthetic construct
  source 1..50: mol_type = other DNA
gcgaatgtcgatgtgtgacgacacattttaataaacactgccacgattta

SEQ ID NO: 52478 - DNA, 50 bp, synthetic construct
  source 1..50: mol_type = other DNA
atatctgaaattttagaaggacatataagagtatctaaaattcacacttt

SEQ ID NO: 52479 - DNA, 50 bp, synthetic construct
  source 1..50: mol_type = other DNA
taacataaaattgcatggatattctattaattatagctttttttatgttc

SEQ ID NO: 52480 - DNA, 50 bp, synthetic construct
  source 1..50: mol_type = other DNA
ccttttctttgcttattttatatatattattataatcagcaagcaaaaga

SEQ ID NO: 52481 - DNA, 50 bp, synthetic construct
  source 1..50: mol_type = other DNA
tacatacatcactctaaaagttattaaaaactaattattaaaaatagact

SEQ ID NO: 52482 - DNA, 50 bp, synthetic construct
  source 1..50: mol_type = other DNA
cgcttgtgtaaaaggatttgtatacttctacagataaattatcatctact

SEQ ID NO: 52483 - DNA, 50 bp, synthetic construct
  source 1..50: mol_type = other DNA
accggatagagaccttatatatagaactgctattccattctctatcctat

SEQ ID NO: 52484 - DNA, 50 bp, synthetic construct
  source 1..50: mol_type = other DNA
cgagacgatcgcgatttccggcaagactaccgcaatacgaaattcagtgg

SEQ ID NO: 52485 - DNA, 50 bp, synthetic construct
  source 1..50: mol_type = other DNA
gcgggttgcgcgggtgcttcgatagacgctgcaagcaacgcgcggcccgc

SEQ ID NO: 52486 - DNA, 50 bp, synthetic construct
  source 1..50: mol_type = other DNA
aggttttcgatggcggcattcgatccaccgacgcccgctaatgaaaacct

SEQ ID NO: 52487 - DNA, 50 bp, synthetic construct
  source 1..50: mol_type = other DNA
gccagtcgatcgcgccgcgcgtcagcccgcgccgggagcgtcgtagaggg

SEQ ID NO: 52488 - DNA, 50 bp, synthetic construct
  source 1..50: mol_type = other DNA
gacggcgacggcatcgagcccgctgcgccgtggcgaatgccgtcgccctt

SEQ ID NO: 52489 - DNA, 50 bp, synthetic construct
  source 1..50: mol_type = other DNA
taaaaccacactggactaaagtcatgtgactttttggtagtctcgagctg

SEQ ID NO: 52490 - DNA, 50 bp, synthetic construct
  source 1..50: mol_type = other DNA
aggttttcgatcgcggcattcgatccaccgacgcccgctaatgaaaacct

SEQ ID NO: 52491 - DNA, 50 bp, synthetic construct
  source 1..50: mol_type = other DNA
tatcttcatcaacgatgtagtgtgaaaaaccaacgtcaccaatgctaata

SEQ ID NO: 52492 - DNA, 50 bp, synthetic construct
  source 1..50: mol_type = other DNA
tggagatattgtccctgtttctgaatcaattgcatgggagtttatcacca

SEQ ID NO: 52493 - DNA, 50 bp, synthetic construct
  source 1..50: mol_type = other DNA
ttccgtaaagcattacccgacttaagccaaaaacaatgtgcttttgataa

SEQ ID NO: 52494 - DNA, 50 bp, synthetic construct
  source 1..50: mol_type = other DNA
taaataacctttgaaatacatttggtaaaatgaatactaaagtaaaatta

SEQ ID NO: 52495 - DNA, 50 bp, synthetic construct
  source 1..50: mol_type = other DNA
tggatattactttgatgatattataaatgatagtccaaacttaaattcaa

SEQ ID NO: 52496 - DNA, 50 bp, synthetic construct
  source 1..50: mol_type = other DNA
agaataatatttttacaaaatatattcttcttttccgtcaatattatcta

SEQ ID NO: 52497 - DNA, 50 bp, synthetic construct
  source 1..50: mol_type = other DNA
catttagcgttcgcctcgctcggcgcggcagatcaggcgaacgacaacgc

SEQ ID NO: 52498 - DNA, 50 bp, synthetic construct
  source 1..50: mol_type = other DNA
ccctcgagatagtcaacgaaactggccaggcagtccgactggggccaggg

SEQ ID NO: 52499 - DNA, 50 bp, synthetic construct
  source 1..50: mol_type = other DNA
ctggattgaaatgttcgggcatggcaagcgctactgacgatagaatctca

SEQ ID NO: 52500 - DNA, 50 bp, synthetic construct
  source 1..50: mol_type = other DNA
agagcaggcggttgtatttcgccatctaaaacgatacaatctaggggtta

SEQ ID NO: 52501 - DNA, 50 bp, synthetic construct
  source 1..50: mol_type = other DNA
ataaccagctatctcctcacggccttggttgtctggagattcagggggcc

SEQ ID NO: 52502 - DNA, 50 bp, synthetic construct
  source 1..50: mol_type = other DNA
tggtaatagtacctttaccatttacgttaatcgggtgatttttattagac

SEQ ID NO: 52503 - DNA, 50 bp, synthetic construct
  source 1..50: mol_type = other DNA
agcaatgcgccgtaataccttacaccactaaggtttataaaagcatacgt

SEQ ID NO: 52504 - DNA, 50 bp, synthetic construct
  source 1..50: mol_type = other DNA
gtctcatattcaatacctaaaatgatccgtgattgcatgtatgaaacgac

SEQ ID NO: 52505 - DNA, 50 bp, synthetic construct
  source 1..50: mol_type = other DNA
ttacgtgtctcatggtgataaactccagtttttaaccagacaacaagtat

SEQ ID NO: 52506 - DNA, 50 bp, synthetic construct
  source 1..50: mol_type = other DNA
atttaattgggtaaagtacgcattataactcgtagtctacatcttgatag

SEQ ID NO: 52507 - DNA, 50 bp, synthetic construct
  source 1..50: mol_type = other DNA
tgcattagctgtaactccacatactttatgatgcataactattcctttca

SEQ ID NO: 52508 - DNA, 50 bp, synthetic construct
  source 1..50: mol_type = other DNA
tcagagtcacttctcaaaaggaactccttcattttgagtatagactgagg

SEQ ID NO: 52509 - DNA, 50 bp, synthetic construct
  source 1..50: mol_type = other DNA
atttgtaaagtgttttttaaaagattttgaaagatacaccgcaaacgaaa

SEQ ID NO: 52510 - DNA, 50 bp, synthetic construct
  source 1..50: mol_type = other DNA
ttaaaagaagaaaaaagtgggccccttgtacctattttatcattttttag

SEQ ID NO: 52511 - DNA, 50 bp, synthetic construct
  source 1..50: mol_type = other DNA
atattttttgctagaatatataaaattacagttattccagcaaagaaggt

SEQ ID NO: 52512 - DNA, 50 bp, synthetic construct
  source 1..50: mol_type = other DNA
attctggcttaattgttcagccatttatggtaaaacaaatagaagtaatt

SEQ ID NO: 52513 - DNA, 50 bp, synthetic construct
  source 1..50: mol_type = other DNA
gtttctgagatgttgttagatattagtggcctaaaaacttgataaataag

SEQ ID NO: 52514 - DNA, 50 bp, synthetic construct
  source 1..50: mol_type = other DNA
gtctttttttggtgtttctgtgttattcaactcaacaataagaaaactct

SEQ ID NO: 52515 - DNA, 50 bp, synthetic construct
  source 1..50: mol_type = other DNA
ggctttataaagtctttttaaatagactcaaaaactgcaaccttaaagct

SEQ ID NO: 52516 - DNA, 50 bp, synthetic construct
  source 1..50: mol_type = other DNA
ggtatgagattacttttattctagtatatcaaaaaaaaaaataaagcagt

SEQ ID NO: 52517 - DNA, 50 bp, synthetic construct
  source 1..50: mol_type = other DNA
tcccaccattttttaagcaatgtttgaagagtgcttaaaaatggttggcg

SEQ ID NO: 52518 - DNA, 50 bp, synthetic construct
  source 1..50: mol_type = other DNA
ccggcgggtttccagcgcttccttcgcccgaagcgctactcgccctcgtt

SEQ ID NO: 52519 - DNA, 50 bp, synthetic construct
  source 1..50: mol_type = other DNA
gattttaattcgattgaataaatttaaaatttaacgataatgaaaaaagt

SEQ ID NO: 52520 - DNA, 50 bp, synthetic construct
  source 1..50: mol_type = other DNA
tataatttttgtttaatttttatttaaatttcatttaagattaaattatt

SEQ ID NO: 52521 - DNA, 50 bp, synthetic construct
  source 1..50: mol_type = other DNA
ttctggtcagttgcagattcgagaattctttaatctttaatcacctagcc

SEQ ID NO: 52522 - DNA, 50 bp, synthetic construct
  source 1..50: mol_type = other DNA
aggggtagttatggctaacaaaaaacgcttggtttgccatagcatcccct

SEQ ID NO: 52523 - DNA, 50 bp, synthetic construct
  source 1..50: mol_type = other DNA
caaaaaaggttttggccgccgatccttacttccgcaaaaaacatgttttc

SEQ ID NO: 52524 - DNA, 50 bp, synthetic construct
  source 1..50: mol_type = other DNA
tcttgatgagattggttactcgttgggactggtagcagattacatcacag

SEQ ID NO: 52525 - DNA, 50 bp, synthetic construct
  source 1..50: mol_type = other DNA
ctggcatgcggggaacgttaagccatgcctgacaggatgcctaccgccag

SEQ ID NO: 52526 - DNA, 50 bp, synthetic construct
  source 1..50: mol_type = other DNA
agaaatatttttttcatactactgatccttcacaggagttctgatttact

SEQ ID NO: 52527 - DNA, 50 bp, synthetic construct
  source 1..50: mol_type = other DNA
gtgtatcataagaaaggtgtaattctgaagagacctttctattgatacac

SEQ ID NO: 52528 - DNA, 50 bp, synthetic construct
  source 1..50: mol_type = other DNA
gtagttttgccagttttaccggtcaattccccggtaagccgcaacactaa

SEQ ID NO: 52529 - DNA, 50 bp, synthetic construct
  source 1..50: mol_type = other DNA
aaataaaacaccattatggcttaacgtactagaataaaggagttttctta

SEQ ID NO: 52530 - DNA, 50 bp, synthetic construct
  source 1..50: mol_type = other DNA
gatagatgatatactatgtcttgtactcaatatcttgtacatcatctttt

SEQ ID NO: 52531 - DNA, 50 bp, synthetic construct
  source 1..50: mol_type = other DNA
gagatcgtaaatgttaagtcaatcgtaccactctatacgcataccgtttc

SEQ ID NO: 52532 - DNA, 50 bp, synthetic construct
  source 1..50: mol_type = other DNA
acttgaatttccataggctgctcctttcccgattcgccagaaatattatg

SEQ ID NO: 52533 - DNA, 50 bp, synthetic construct
  source 1..50: mol_type = other DNA
cctggcgaagccttttcataactctcggacattctccgggctctttttag

SEQ ID NO: 52534 - DNA, 50 bp, synthetic construct
  source 1..50: mol_type = other DNA
tatttttgtcatagctcatttcctccagaacctggattgggcagaaaatc

SEQ ID NO: 52535 - DNA, 50 bp, synthetic construct
  source 1..50: mol_type = other DNA
agtacattatgagtcgggatggagtggcaatcctggacgcattgaaaact

SEQ ID NO: 52536 - DNA, 50 bp, synthetic construct
  source 1..50: mol_type = other DNA
aaacggaaagtcaatgcttatcggcgcctattagggatgccggctctttt

SEQ ID NO: 52537 - DNA, 50 bp, synthetic construct
  source 1..50: mol_type = other DNA
acctcaacattacatgtatatgcttacaatctaagtatcagttttgaggt

SEQ ID NO: 52538 - DNA, 50 bp, synthetic construct
  source 1..50: mol_type = other DNA
aacaatggagaagaagataagttttagaaacaatctgtttactagaactt

SEQ ID NO: 52539 - DNA, 50 bp, synthetic construct
  source 1..50: mol_type = other DNA
ttcgcttttcatcggttttacggttttccggtaaaggtttcaaaaccaaa

SEQ ID NO: 52540 - DNA, 50 bp, synthetic construct
  source 1..50: mol_type = other DNA
acataatatcatcgtgggcggtcttccgatcgagctggatggaaatgaag

SEQ ID NO: 52541 - DNA, 50 bp, synthetic construct
  source 1..50: mol_type = other DNA
aaaactggtggaacagattttcagggagaaaaatccgaatacaggactat

SEQ ID NO: 52542 - DNA, 50 bp, synthetic construct
  source 1..50: mol_type = other DNA
ttctatattaatagcggagattttataaaatccctgccatccgtatccgg

SEQ ID NO: 52543 - DNA, 50 bp, synthetic construct
  source 1..50: mol_type = other DNA
attaaccagatcaaagacgcggacggctcttcgtatgagaccggaacccc

SEQ ID NO: 52544 - DNA, 50 bp, synthetic construct
  source 1..50: mol_type = other DNA
tcaaaggacaaaacaaaagatgagttccgggctttcagagtgatatatac

SEQ ID NO: 52545 - DNA, 50 bp, synthetic construct
  source 1..50: mol_type = other DNA
aacggttacaagcaataaggcactcggaggatttcctgctgaagatctcc

SEQ ID NO: 52546 - DNA, 50 bp, synthetic construct
  source 1..50: mol_type = other DNA
ggcatagataaaataagacattgtatgcactggcttatttcgaaaaatac

SEQ ID NO: 52547 - DNA, 50 bp, synthetic construct
  source 1..50: mol_type = other DNA
tcgcatgattgaggagtgcatggccggaaataatgccagaaataccttga

SEQ ID NO: 52548 - DNA, 50 bp, synthetic construct
  source 1..50: mol_type = other DNA
cggatacctttcacctttctttccttttcccgaaagaacaatgccatcac

SEQ ID NO: 52549 - DNA, 50 bp, synthetic construct
  source 1..50: mol_type = other DNA
tgacgaggatcattacacgtccatcactgaattccggggcatccctcttt

SEQ ID NO: 52550 - DNA, 50 bp, synthetic construct
  source 1..50: mol_type = other DNA
ggctgtaatagttgctgccgaatgtaaggatggcaagaagcgttacagtt

SEQ ID NO: 52551 - DNA, 50 bp, synthetic construct
  source 1..50: mol_type = other DNA
ctcattaaaactttttgcaactaatatatcatataaaataatgaaataaa

SEQ ID NO: 52552 - DNA, 50 bp, synthetic construct
  source 1..50: mol_type = other DNA
gcggataaccaatctgagcggctgcaggccggtggcgaggttgtgctaaa

SEQ ID NO: 52553 - DNA, 50 bp, synthetic construct
  source 1..50: mol_type = other DNA
tcttcttgtatgtatgagcagggatcataatggcaacggcgacaagaaga

SEQ ID NO: 52554 - DNA, 50 bp, synthetic construct
  source 1..50: mol_type = other DNA
actgtaacgcttcttgccattcttatcttccaacaaaaccaccctacggt

SEQ ID NO: 52555 - DNA, 50 bp, synthetic construct
  source 1..50: mol_type = other DNA
tttctcctttctttgggtagtctatataaaaattccatcaatctgagaaa

SEQ ID NO: 52556 - DNA, 50 bp, synthetic construct
  source 1..50: mol_type = other DNA
ttcaattgtatctgattgattgtttcaagaaaacacttgctattattggc

SEQ ID NO: 52557 - DNA, 50 bp, synthetic construct
  source 1..50: mol_type = other DNA
acggtaaaactcttgacaatcctataccagattgtcagaccggttgtaaa

SEQ ID NO: 52558 - DNA, 50 bp, synthetic construct
  source 1..50: mol_type = other DNA
ggggccgctgctgtcggagtgggccggcgctctccagtgccgccagatag

SEQ ID NO: 52559 - DNA, 50 bp, synthetic construct
  source 1..50: mol_type = other DNA
cgaaagcctgctctccattttctgaacaggcggcggagacaagaattacg

SEQ ID NO: 52560 - DNA, 50 bp, synthetic construct
  source 1..50: mol_type = other DNA
gcccgttgaatagtataaagtgatccagggctgattactattatattata

SEQ ID NO: 52561 - DNA, 50 bp, synthetic construct
  source 1..50: mol_type = other DNA
aagccagctgaaaaataagatagtcgatattcttatttcatctctgcctg

SEQ ID NO: 52562 - DNA, 50 bp, synthetic construct
  source 1..50: mol_type = other DNA
aagctatttgtttagttttaaattgtttcttaaatccgaaacaggtctga

SEQ ID NO: 52563 - DNA, 50 bp, synthetic construct
  source 1..50: mol_type = other DNA
gcaaacgccagcgactatgtttatgcacagtattggcggcttgaatttgt

SEQ ID NO: 52564 - DNA, 50 bp, synthetic construct
  source 1..50: mol_type = other DNA
aaatatagaaaattaattttcaaaattttacaaatataatttttagattt

SEQ ID NO: 52565 - DNA, 50 bp, synthetic construct
  source 1..50: mol_type = other DNA
aggtttctttgtcagatgattttaaagttttaaggaacgcatagaaacgc

SEQ ID NO: 52566 - DNA, 50 bp, synthetic construct
  source 1..50: mol_type = other DNA
actgccgtgtgtcaacagatcaggaagcagatcagaaacaagctggcaaa

SEQ ID NO: 52567 - DNA, 50 bp, synthetic construct
  source 1..50: mol_type = other DNA
tagatcacccggaaaccccactttcagaaagccggatacacggacatcta

SEQ ID NO: 52568 - DNA, 50 bp, synthetic construct
  source 1..50: mol_type = other DNA
agatcactgcattcatgtgtaaatttctttgcaggggaacgaggtcaagt

SEQ ID NO: 52569 - DNA, 50 bp, synthetic construct
  source 1..50: mol_type = other DNA
aaaaaaatcagctccttttttagaaatctcttcttttagctgggtcattt

SEQ ID NO: 52570 - DNA, 50 bp, synthetic construct
  source 1..50: mol_type = other DNA
aaccgccgccacgcaggcgggagccggccgtgttctttgtggcgttggtg

SEQ ID NO: 52571 - DNA, 50 bp, synthetic construct
  source 1..50: mol_type = other DNA
agtgccgggattcgaatggggatttttctttggaaccgtgacaactgaat

SEQ ID NO: 52572 - DNA, 50 bp, synthetic construct
  source 1..50: mol_type = other DNA
gatctgaatttccacaagccatacctatgctgtctttggaatttcagaga

SEQ ID NO: 52573 - DNA, 50 bp, synthetic construct
  source 1..50: mol_type = other DNA
tgaaacaaaagctaaatctgatggaggattttcttttaaaagttctgtca

SEQ ID NO: 52574 - DNA, 50 bp, synthetic construct
  source 1..50: mol_type = other DNA
caaatgttctgattgcgatagctgaccttctaaaacattatttacagaaa

SEQ ID NO: 52575 - DNA, 50 bp, synthetic construct
  source 1..50: mol_type = other DNA
tgtataagttgtatttttctcccagctttcagagtgatatatagactacc

SEQ ID NO: 52576 - DNA, 50 bp, synthetic construct
  source 1..50: mol_type = other DNA
tttctcccagccaatatattctttgaaaggatgataagaatggcaagaag

SEQ ID NO: 52577 - DNA, 50 bp, synthetic construct
  source 1..50: mol_type = other DNA
taaaaaagagtataaaaataacagccatattattataatataagattttg

SEQ ID NO: 52578 - DNA, 50 bp, synthetic construct
  source 1..50: mol_type = other DNA
tccgttagaaatgactcatgatgcgtcggaaaggagtgatttcatgcgga

SEQ ID NO: 52579 - DNA, 50 bp, synthetic construct
  source 1..50: mol_type = other DNA
tgaccggagggggaatcgaacccccgggtgtagagcatcccctcccacct

SEQ ID NO: 52580 - DNA, 50 bp, synthetic construct
  source 1..50: mol_type = other DNA
tctcaggctcatgtgccggtggtgtcaacccgagggccaatataataact

SEQ ID NO: 52581 - DNA, 50 bp, synthetic construct
  source 1..50: mol_type = other DNA
ctgcacctactgatggagaatttcaaagcctcttatactggtaggagcag

SEQ ID NO: 52582 - DNA, 50 bp, synthetic construct
  source 1..50: mol_type = other DNA
aggcgactgttctatgagccgtaaaacgagtgtccataactcaaatccgt

SEQ ID NO: 52583 - DNA, 50 bp, synthetic construct
  source 1..50: mol_type = other DNA
ggaagtatttttgtttcaagtgtagatacataggaaacaaaaagaaaaga

SEQ ID NO: 52584 - DNA, 50 bp, synthetic construct
  source 1..50: mol_type = other DNA
gcaaacgctgcctttttcgacagcctacgaataaattttacagcgtttcc

SEQ ID NO: 52585 - DNA, 50 bp, synthetic construct
  source 1..50: mol_type = other DNA
acattgttgccgcttcatgtaattatcacggcatgacgggaaataaaagg

SEQ ID NO: 52586 - DNA, 50 bp, synthetic construct
  source 1..50: mol_type = other DNA
tatagttatcctgtttgtcctaatgagtatggctaaacaggataactata

SEQ ID NO: 52587 - DNA, 50 bp, synthetic construct
  source 1..50: mol_type = other DNA
tgcttatttattttaacatttccgaacggcttgcaacaaacttaaaacta

SEQ ID NO: 52588 - DNA, 50 bp, synthetic construct
  source 1..50: mol_type = other DNA
tttttcaaaattcagtacccgatttttatgacaaacacaatttttaaaaa

SEQ ID NO: 52589 - DNA, 50 bp, synthetic construct
  source 1..50: mol_type = other DNA
gatgcagagatagagaaaaagagagctgtgattatgtttattaaggctaa

SEQ ID NO: 52590 - DNA, 50 bp, synthetic construct
  source 1..50: mol_type = other DNA
tgtacaaccttgattaatttttttataattgatacaaaaaagcttcaagc

SEQ ID NO: 52591 - DNA, 50 bp, synthetic construct
  source 1..50: mol_type = other DNA
aattttattaataaaatgcatccagaaggattcaagagtttaagaaaagg

SEQ ID NO: 52592 - DNA, 50 bp, synthetic construct
  source 1..50: mol_type = other DNA
caacaagaaaggatgcggcagtacataccagcaaagcagattttgactgc

SEQ ID NO: 52593 - DNA, 50 bp, synthetic construct
  source 1..50: mol_type = other DNA
catcgggaatacggactcccggacatgtccgtaatataatctgccagatc

SEQ ID NO: 52594 - DNA, 50 bp, synthetic construct
  source 1..50: mol_type = other DNA
tgaacttctgataattttttattatgcaatatgccgctacccgaaggttt

SEQ ID NO: 52595 - DNA, 50 bp, synthetic construct
  source 1..50: mol_type = other DNA
tttgtccgcaaagctttgaataaaatttctgtcaaataaattaacacaaa

SEQ ID NO: 52596 - DNA, 50 bp, synthetic construct
  source 1..50: mol_type = other DNA
agccacagaaaacagcgcaactgcgggtttctggacttttttcttattct

SEQ ID NO: 52597 - DNA, 50 bp, synthetic construct
  source 1..50: mol_type = other DNA
tcatctgttgagcggcacacgcaattacacttttgccgctatacagcccg

SEQ ID NO: 52598 - DNA, 50 bp, synthetic construct
  source 1..50: mol_type = other DNA
cagcctttcaaatgctataagaacaccctgttagacattcctaccggttg

SEQ ID NO: 52599 - DNA, 50 bp, synthetic construct
  source 1..50: mol_type = other DNA
atttccgcctaaccaaaaattgaaaattcgtttttaaggtcatcggatag

SEQ ID NO: 52600 - DNA, 50 bp, synthetic construct
  source 1..50: mol_type = other DNA
aagaccggctctgccgacggctttggcggtaaagaagcagaagccgctat

SEQ ID NO: 52601 - DNA, 50 bp, synthetic construct
  source 1..50: mol_type = other DNA
cacctcacaaaatatgttatcttttgaaagattacataggaaaggaggta

SEQ ID NO: 52602 - DNA, 50 bp, synthetic construct
  source 1..50: mol_type = other DNA
cggatatcgaccgccgcttccctaccgcaccgatcatcgtatcatcccca

SEQ ID NO: 52603 - DNA, 50 bp, synthetic construct
  source 1..50: mol_type = other DNA
tgtacagcacacgagccaccgacacgtgaaggagttccagctgaaaaaca

SEQ ID NO: 52604 - DNA, 50 bp, synthetic construct
  source 1..50: mol_type = other DNA
agagggcaaacttcttgcatccctcctggattccatccagttcttagagc

SEQ ID NO: 52605 - DNA, 50 bp, synthetic construct
  source 1..50: mol_type = other DNA
cgatcaggccttgcagcgctccagatctggagggcctgacagactgtagg

SEQ ID NO: 52606 - DNA, 50 bp, synthetic construct
  source 1..50: mol_type = other DNA
gttctctcgttctgttccgtctgagttcagattttccactctacttgaac

SEQ ID NO: 52607 - DNA, 50 bp, synthetic construct
  source 1..50: mol_type = other DNA
cacaccctccgcgacggcacactgcttaaatatgagataataatggtgta

SEQ ID NO: 52608 - DNA, 50 bp, synthetic construct
  source 1..50: mol_type = other DNA
gtatccagggccgcgcaagagagggatggttaaactgcggcgctggccgg

SEQ ID NO: 52609 - DNA, 50 bp, synthetic construct
  source 1..50: mol_type = other DNA
actactggctgttcggccatcttcatttagatgaacgaacagacagcgat

SEQ ID NO: 52610 - DNA, 50 bp, synthetic construct
  source 1..50: mol_type = other DNA
catcatgagcgtctatgtcacaggcgccctctacatggcggctctggatg

SEQ ID NO: 52611 - DNA, 50 bp, synthetic construct
  source 1..50: mol_type = other DNA
gcaccatggcgggcttcaaaaagggcagttttggtagcgcgcttgaatgg

SEQ ID NO: 52612 - DNA, 50 bp, synthetic construct
  source 1..50: mol_type = other DNA
tttgcgaattcgttcttgatagagatctggggcaagccgccgtctgcgtc

SEQ ID NO: 52613 - DNA, 50 bp, synthetic construct
  source 1..50: mol_type = other DNA
atgggtcagtgcgcgtagttggcgatcgcagtatctcagctgaacgccga

SEQ ID NO: 52614 - DNA, 50 bp, synthetic construct
  source 1..50: mol_type = other DNA
agttatcacaaaagagtatccaaaatatataatactaattgcgcctaacg

SEQ ID NO: 52615 - DNA, 50 bp, synthetic construct
  source 1..50: mol_type = other DNA
tgcttgctcacaaatatacctccgtttcatcagaaatttgtgtgtgattg

SEQ ID NO: 52616 - DNA, 50 bp, synthetic construct
  source 1..50: mol_type = other DNA
aatttcttcattaaacgttaatgaaatcatttgcattcatctaaaaaaat

SEQ ID NO: 52617 - DNA, 50 bp, synthetic construct
  source 1..50: mol_type = other DNA
ctttttcgaactatccatgatattatatcatcatctattattttaatttt

SEQ ID NO: 52618 - DNA, 50 bp, synthetic construct
  source 1..50: mol_type = other DNA
tgtattttttgagctgcccagagaagggagtgcaaacctttgaaaatact

SEQ ID NO: 52619 - DNA, 50 bp, synthetic construct
  source 1..50: mol_type = other DNA
tgagctgcccagagaagttctccatctgggtgcatggcggaaacatggca

SEQ ID NO: 52620 - DNA, 50 bp, synthetic construct
  source 1..50: mol_type = other DNA
tgtattttttgagctgcccagagaaggagataacatctgatgaaaaaaca

SEQ ID NO: 52621 - DNA, 50 bp, synthetic construct
  source 1..50: mol_type = other DNA
tcggacggtctgtgttcttgccgctgacgggaggtgttccgcccgtcaga

SEQ ID NO: 52622 - DNA, 50 bp, synthetic construct
  source 1..50: mol_type = other DNA
ctgccgaatctgaccgcagcagccccggtgcccatggcaacatggggcaa

SEQ ID NO: 52623 - DNA, 50 bp, synthetic construct
  source 1..50: mol_type = other DNA
aaatggccatttttataaccggtgatcgaccagtttaccaatggcacgga

SEQ ID NO: 52624 - DNA, 50 bp, synthetic construct
  source 1..50: mol_type = other DNA
aaaacggtacgttggagatcgtgccggaggggtctgtcagatacacgccg

SEQ ID NO: 52625 - DNA, 50 bp, synthetic construct
  source 1..50: mol_type = other DNA
tataaaagcgaggatgaacgatattcggagcgggcatctccgcagcggag

SEQ ID NO: 52626 - DNA, 50 bp, synthetic construct
  source 1..50: mol_type = other DNA
agccgccccggtatctaatctacttcgcaacattgttgtccggggctgct

SEQ ID NO: 52627 - DNA, 50 bp, synthetic construct
  source 1..50: mol_type = other DNA
gtctttggatttatgctttttgaagcgaagcaatgcagcccccaaaaatc

SEQ ID NO: 52628 - DNA, 50 bp, synthetic construct
  source 1..50: mol_type = other DNA
cggatttccaaatccgctatcagccggacgttctttgacaacgaaataaa

SEQ ID NO: 52629 - DNA, 50 bp, synthetic construct
  source 1..50: mol_type = other DNA
ccttattaacactttcgtaacaaatatatgagaagaaagaaagtcgaggg

SEQ ID NO: 52630 - DNA, 50 bp, synthetic construct
  source 1..50: mol_type = other DNA
tttcgtccatattttgttttcaaggttccgaaaaacaaatatgggcctat

SEQ ID NO: 52631 - DNA, 50 bp, synthetic construct
  source 1..50: mol_type = other DNA
tgacaaaatagcatccgacctcttgcaagaaaaaagtacaacttttttca

SEQ ID NO: 52632 - DNA, 50 bp, synthetic construct
  source 1..50: mol_type = other DNA
gatacggcaggccatccgggaactggcgcaaaagagggacttcccgtagt

SEQ ID NO: 52633 - DNA, 50 bp, synthetic construct
  source 1..50: mol_type = other DNA
tgtacagcggcaaaagcgttaaatttatggaatttttttagaaccgcccc

SEQ ID NO: 52634 - DNA, 50 bp, synthetic construct
  source 1..50: mol_type = other DNA
gtccgccgtgcaggttccgatttaaagatgttggaacagaaaactgacgg

SEQ ID NO: 52635 - DNA, 50 bp, synthetic construct
  source 1..50: mol_type = other DNA
gtgcatacaggcgttgatcccgttcatcctggatccacggctgcatcccg

SEQ ID NO: 52636 - DNA, 50 bp, synthetic construct
  source 1..50: mol_type = other DNA
cggctaccgtatgacgctgggcgagatgccggagcgatatacctatgata

SEQ ID NO: 52637 - DNA, 50 bp, synthetic construct
  source 1..50: mol_type = other DNA
aattttgagcgattcaaaccaaaatactttgatttgaagaaggagatttt

SEQ ID NO: 52638 - DNA, 50 bp, synthetic construct
  source 1..50: mol_type = other DNA
aaaattctcctataagtattgaaatttatcaatcctgataataagtattg

SEQ ID NO: 52639 - DNA, 50 bp, synthetic construct
  source 1..50: mol_type = other DNA
ccatgtggggcgtgacagcttggaaacggaaaatcaattccccctcgcgt

SEQ ID NO: 52640 - DNA, 50 bp, synthetic construct
  source 1..50: mol_type = other DNA
atttggttgaagcatttaagaatgtcgggtatgttgtatgtgataaaaag

SEQ ID NO: 52641 - DNA, 50 bp, synthetic construct
  source 1..50: mol_type = other DNA
agaaatctcaaccatgagggtggggtgacacccacattgaagttagactg

SEQ ID NO: 52642 - DNA, 50 bp, synthetic construct
  source 1..50: mol_type = other DNA
cccggccagaagaccgctgccctgcgctatggatcaccgtactgtcatgg

SEQ ID NO: 52643 - DNA, 50 bp, synthetic construct
  source 1..50: mol_type = other DNA
gcggctcctggcggagcggggcgccctcgccccgccccggaaggaggaca

SEQ ID NO: 52644 - DNA, 50 bp, synthetic construct
  source 1..50: mol_type = other DNA
tacggcaaacagcacctcggccagctatgaccgccgtgatctacgcccgc

SEQ ID NO: 52645 - DNA, 50 bp, synthetic construct
  source 1..50: mol_type = other DNA
tttatccagttttgcaatggcttcatatgcacatgagcaattacaataaa

SEQ ID NO: 52646 - DNA, 50 bp, synthetic construct
  source 1..50: mol_type = other DNA
actatggaattgaactttatcaaatcgttcccctgtgtcacatccatcgt

SEQ ID NO: 52647 - DNA, 50 bp, synthetic construct
  source 1..50: mol_type = other DNA
gtttaaaattaccaatatttgccttaagggaatcggaggtactattatga

SEQ ID NO: 52648 - DNA, 50 bp, synthetic construct
  source 1..50: mol_type = other DNA
aagttctgaaaaaggatctggaatatttttgtactcatttttagtgcgac

SEQ ID NO: 52649 - DNA, 50 bp, synthetic construct
  source 1..50: mol_type = other DNA
tacgttggagatcgtgccggaggagcagctccgtcaccgagaccaaggcc

SEQ ID NO: 52650 - DNA, 50 bp, synthetic construct
  source 1..50: mol_type = other DNA
aatagaaaagggagaaaggaaatggcctccgcgctgttcccttttcgcca

SEQ ID NO: 52651 - DNA, 50 bp, synthetic construct
  source 1..50: mol_type = other DNA
tgctggaaagcctttcttttggtgcttcttggcggagaaccttttgagcc

SEQ ID NO: 52652 - DNA, 50 bp, synthetic construct
  source 1..50: mol_type = other DNA
tcaatcagtgtgtatgaattaattataattacaccatacctttctacatc

SEQ ID NO: 52653 - DNA, 50 bp, synthetic construct
  source 1..50: mol_type = other DNA
tgccagaggtctgttcaaaaagcacttgctttttctcgcaaaatgtggta

SEQ ID NO: 52654 - DNA, 50 bp, synthetic construct
  source 1..50: mol_type = other DNA
acaggttggcatccacgctgtccacattgtgggcgaggatgcggtgtcag

SEQ ID NO: 52655 - DNA, 50 bp, synthetic construct
  source 1..50: mol_type = other DNA
taaagtaaaacctttaaccttcaaacactaagggtataggtcttttttct

SEQ ID NO: 52656 - DNA, 50 bp, synthetic construct
  source 1..50: mol_type = other DNA
gctgaagccgatgctttcatcattgaaaggaaggtgagttgatgaaaagg

SEQ ID NO: 52657 - DNA, 50 bp, synthetic construct
  source 1..50: mol_type = other DNA
gcaggattccgttgacgctgttcgatatcgtcccgtcatcgggcttctat

SEQ ID NO: 52658 - DNA, 50 bp, synthetic construct
  source 1..50: mol_type = other DNA
tcgcgacgcgcacaccgatctacgcgaagggcagattgtgcagaacgtcg

SEQ ID NO: 52659 - DNA, 50 bp, synthetic construct
  source 1..50: mol_type = other DNA
ttttgctaagtttgtggtataaatataattaggtagaaaagcggagaggt

SEQ ID NO: 52660 - DNA, 50 bp, synthetic construct
  source 1..50: mol_type = other DNA
gtcaaaacttgatattccaaggctttatctatgatgtatccatatttgat

SEQ ID NO: 52661 - DNA, 50 bp, synthetic construct
  source 1..50: mol_type = other DNA
agtaaaacaacaaataattggttcgattatcaatgttttgtatctttatg

SEQ ID NO: 52662 - DNA, 50 bp, synthetic construct
  source 1..50: mol_type = other DNA
gtgtcgatttcataaaaactttagatcaaaagctttgtcatgatcacctt

SEQ ID NO: 52663 - DNA, 50 bp, synthetic construct
  source 1..50: mol_type = other DNA
ttttattttttatcaaatctgggtaaggacagattctacccaaaccttat

SEQ ID NO: 52664 - DNA, 50 bp, synthetic construct
  source 1..50: mol_type = other DNA
aactcctcatccaattccattcgcagctcaaaaaaaaaggatgatacaaa

SEQ ID NO: 52665 - DNA, 50 bp, synthetic construct
  source 1..50: mol_type = other DNA
cgaaagaagtgctcaatctggcgttacaacaagagtaagcgtcactcatt

SEQ ID NO: 52666 - DNA, 50 bp, synthetic construct
  source 1..50: mol_type = other DNA
aatgctttcgtccaagcactcaaccacagattgtgggcgaaacgactgga

SEQ ID NO: 52667 - DNA, 50 bp, synthetic construct
  source 1..50: mol_type = other DNA
ttagacttacctaataaggacggtgttggcggttggctatgatagaataa

SEQ ID NO: 52668 - DNA, 50 bp, synthetic construct
  source 1..50: mol_type = other DNA
agatatttaatgatacaagtatgatggcataaatttatcaggtcgaatta

SEQ ID NO: 52669 - DNA, 50 bp, synthetic construct
  source 1..50: mol_type = other DNA
caggttgtagatatggattggtggcaacatcaggtcagaaagaaaatcaa

SEQ ID NO: 52670 - DNA, 50 bp, synthetic construct
  source 1..50: mol_type = other DNA
taaagtcgaaattttcaatatggatatcattcattaaattagttttatta

SEQ ID NO: 52671 - DNA, 50 bp, synthetic construct
  source 1..50: mol_type = other DNA
cactatatatcactctaaaaaggatacttttttgagattggtacgataac

SEQ ID NO: 52672 - DNA, 50 bp, synthetic construct
  source 1..50: mol_type = other DNA
atcagccaacgacggccacaagaagcgcggcctcgccggggttgaggacg

SEQ ID NO: 52673 - DNA, 50 bp, synthetic construct
  source 1..50: mol_type = other DNA
accgatcaggacgtggtcgacatgaaaatatcgaaaataagatgatagga

SEQ ID NO: 52674 - DNA, 50 bp, synthetic construct
  source 1..50: mol_type = other DNA
tgcaactgaccatggcgctactgccagcgccagtgtctcgatcagtggca

SEQ ID NO: 52675 - DNA, 50 bp, synthetic construct
  source 1..50: mol_type = other DNA
cgctagcactgatggccaatcacgcgcgtctccggataaaatgaatggcg

SEQ ID NO: 52676 - DNA, 50 bp, synthetic construct
  source 1..50: mol_type = other DNA
tccgttggttttgtcaagctgcggcgcaacacactctgaaactcatcccg

SEQ ID NO: 52677 - DNA, 50 bp, synthetic construct
  source 1..50: mol_type = other DNA
tgacgacatcctggccaaagctcgcgccttctacgagaggattgcgccac

SEQ ID NO: 52678 - DNA, 50 bp, synthetic construct
  source 1..50: mol_type = other DNA
ccgctctggcggtcccggcttgtcatcacggtccaggcagggtggagcac

SEQ ID NO: 52679 - DNA, 50 bp, synthetic construct
  source 1..50: mol_type = other DNA
gatgccggctgtttcgagtgcccggcgaggtagtgattacccccggcgat

SEQ ID NO: 52680 - DNA, 50 bp, synthetic construct
  source 1..50: mol_type = other DNA
cataggctaatttttaaaaaaagtaatctttttatgaaaattgcagactt

SEQ ID NO: 52681 - DNA, 50 bp, synthetic construct
  source 1..50: mol_type = other DNA
acttgattgccctagaaagatatattattatctttgtactatattaaaat

SEQ ID NO: 52682 - DNA, 50 bp, synthetic construct
  source 1..50: mol_type = other DNA
aaatttctgttggtgcgactcatacgccagaagcgggcaacgagaaggga

SEQ ID NO: 52683 - DNA, 50 bp, synthetic construct
  source 1..50: mol_type = other DNA
ccctctcacaaaaaccgtgtgacctgcgattggcggtgcttggcgagccg

SEQ ID NO: 52684 - DNA, 50 bp, synthetic construct
  source 1..50: mol_type = other DNA
gccaatccgagagtgcggcgcgcagctgcgcgatttgttcgcgacggact

SEQ ID NO: 52685 - DNA, 50 bp, synthetic construct
  source 1..50: mol_type = other DNA
tccgtttgcaagatcaacctctcgacgacgagcgtggtcggcgcaacgcc

SEQ ID NO: 52686 - DNA, 50 bp, synthetic construct
  source 1..50: mol_type = other DNA
aatagataaggaaacatcacaaaaatttatcgatactttacctgtatata

SEQ ID NO: 52687 - DNA, 50 bp, synthetic construct
  source 1..50: mol_type = other DNA
gattttgatatgtttccacattgggcaatatgtgttgaaaaattaatatc

SEQ ID NO: 52688 - DNA, 50 bp, synthetic construct
  source 1..50: mol_type = other DNA
gaagcaaaatatgttgcgtaagacaatacttttgcaatatgtgttgaaaa

SEQ ID NO: 52689 - DNA, 50 bp, synthetic construct
  source 1..50: mol_type = other DNA
tggtctacctattttgtgagttttaactaactcatagtcctcgtgtttgg

SEQ ID NO: 52690 - DNA, 50 bp, synthetic construct
  source 1..50: mol_type = other DNA
attttatctattgttaaataaatttctaaaaaacatgaaatcagtaaaag

SEQ ID NO: 52691 - DNA, 50 bp, synthetic construct
  source 1..50: mol_type = other DNA
ccgctgcccgcattcgattcaaacagtgtggtgtccaatgcgggggacgt

SEQ ID NO: 52692 - DNA, 50 bp, synthetic construct
  source 1..50: mol_type = other DNA
gtatattttacatcacattgagggatacctcaaccagaaggacaagagtg

SEQ ID NO: 52693 - DNA, 50 bp, synthetic construct
  source 1..50: mol_type = other DNA
tcactgccgctcctgtgaacagcaggtgccgtccttcggggcggcactgc

SEQ ID NO: 52694 - DNA, 50 bp, synthetic construct
  source 1..50: mol_type = other DNA
cgggtcggagatagcagtataacagccgtttatctgctatctgctccccg

SEQ ID NO: 52695 - DNA, 50 bp, synthetic construct
  source 1..50: mol_type = other DNA
cctgatatcaaacgaacatctgctgcaggaagcaagagcttgacagttag

SEQ ID NO: 52696 - DNA, 50 bp, synthetic construct
  source 1..50: mol_type = other DNA
gggctcgaacccacaaccacctgatcttggttgaacaacggttccagcgc

SEQ ID NO: 52697 - DNA, 50 bp, synthetic construct
  source 1..50: mol_type = other DNA
tttccggccatcgaagaaacgtccgtcgtcgatggaccgacaaccgggaa

SEQ ID NO: 52698 - DNA, 50 bp, synthetic construct
  source 1..50: mol_type = other DNA
cgctaggggtttgtctggaggagttaacaaaagaccttgaaaaattagga

SEQ ID NO: 52699 - DNA, 50 bp, synthetic construct
  source 1..50: mol_type = other DNA
aaagaaatgcccgtggcagattgttcacaaacatatactgccatttctta

SEQ ID NO: 52700 - DNA, 50 bp, synthetic construct
  source 1..50: mol_type = other DNA
cataggccacatctcactaaattagaagatttagtgagatattgcttatt

SEQ ID NO: 52701 - DNA, 50 bp, synthetic construct
  source 1..50: mol_type = other DNA
agaggttgaacgccaactcgacgaggccgtggagatcctcatgaacgtca

SEQ ID NO: 52702 - DNA, 50 bp, synthetic construct
  source 1..50: mol_type = other DNA
ttttttgccatgttttctcacttccatctctgcctgtacctgttcaaaaa

SEQ ID NO: 52703 - DNA, 50 bp, synthetic construct
  source 1..50: mol_type = other DNA
gaagaaaccacagctgctccggcggtaagtggagtggcggtgaatcgact

SEQ ID NO: 52704 - DNA, 50 bp, synthetic construct
  source 1..50: mol_type = other DNA
gcgcacttctgcccaaagcatgaatccgcttgctctggcagatagtctgg

SEQ ID NO: 52705 - DNA, 50 bp, synthetic construct
  source 1..50: mol_type = other DNA
atcttgttttctatggacatcggatacccgaagccttacgaaaaggaggc

SEQ ID NO: 52706 - DNA, 50 bp, synthetic construct
  source 1..50: mol_type = other DNA
aatgatctccgccattctttatcagctgactaagacagtaaaagatctca

SEQ ID NO: 52707 - DNA, 50 bp, synthetic construct
  source 1..50: mol_type = other DNA
gccggtcttcccgaaggtcgcctggaacggctaccacttcttcaacctga

SEQ ID NO: 52708 - DNA, 50 bp, synthetic construct
  source 1..50: mol_type = other DNA
ctttcaaccttcgtgtttttaccgacgcataaatcgacgaaacaagaaag

SEQ ID NO: 52709 - DNA, 50 bp, synthetic construct
  source 1..50: mol_type = other DNA
tggcaagctggatgggagagccgtaggtatcattgttattgttcttgcca

SEQ ID NO: 52710 - DNA, 50 bp, synthetic construct
  source 1..50: mol_type = other DNA
ggcgggctgggcctgccggggcgtgcacaaccgcctcgcccgctcccgcg

SEQ ID NO: 52711 - DNA, 50 bp, synthetic construct
  source 1..50: mol_type = other DNA
tcggttggtggtcggtcattcagcctcctccttgacggtgagcttcttga

SEQ ID NO: 52712 - DNA, 50 bp, synthetic construct
  source 1..50: mol_type = other DNA
aactagtaatcaaacaaattatccaatttcaatttttttaattaacaatt

SEQ ID NO: 52713 - DNA, 50 bp, synthetic construct
  source 1..50: mol_type = other DNA
ttcctcaatcaatttcaagtccttatgatgaagtgaagttggttgatcaa

SEQ ID NO: 52714 - DNA, 50 bp, synthetic construct
  source 1..50: mol_type = other DNA
ccacgttcctgttcgtgtccattgcgcaaagcggaggatgcggaaatgag

SEQ ID NO: 52715 - DNA, 50 bp, synthetic construct
  source 1..50: mol_type = other DNA
attgattaaatcctttttatttcttaactaataattaaaattaaactata

SEQ ID NO: 52716 - DNA, 50 bp, synthetic construct
  source 1..50: mol_type = other DNA
cgccggtccatttgcccttgcggcgcggccctcgggcatcggaaccggct

SEQ ID NO: 52717 - DNA, 50 bp, synthetic construct
  source 1..50: mol_type = other DNA
tatcgagagccgatagtcctttaatctataagggtgttcttcgatatcga

SEQ ID NO: 52718 - DNA, 50 bp, synthetic construct
  source 1..50: mol_type = other DNA
tttccggtactatacatcactctaaagcaggtgatgttcaggctcttgtt

SEQ ID NO: 52719 - DNA, 50 bp, synthetic construct
  source 1..50: mol_type = other DNA
gtctagcgtgtagaaagaactggccggaaaattacatcttcacggaagag

SEQ ID NO: 52720 - DNA, 50 bp, synthetic construct
  source 1..50: mol_type = other DNA
ggtaacaatccattctagtgggattataccgacttattgacttgactata

SEQ ID NO: 52721 - DNA, 50 bp, synthetic construct
  source 1..50: mol_type = other DNA
attttttgaattacacttgtcaatattttcgatagtttattatggaattc

SEQ ID NO: 52722 - DNA, 50 bp, synthetic construct
  source 1..50: mol_type = other DNA
tgaagaacagaaaaaatacgaaaaagtttgcgaaaattttcttacaaatt

SEQ ID NO: 52723 - DNA, 50 bp, synthetic construct
  source 1..50: mol_type = other DNA
aaaaaggaattgatagaagttgctggcagccacccttttctttccttttt

SEQ ID NO: 52724 - DNA, 50 bp, synthetic construct
  source 1..50: mol_type = other DNA
tttattcctttcaaagggcgtgaaatttcaccgcctttgatgtcatcaaa

SEQ ID NO: 52725 - DNA, 50 bp, synthetic construct
  source 1..50: mol_type = other DNA
acgagcgcatcgtcgtccgaggcgtcgctctcggcggtcgccacggccgt

SEQ ID NO: 52726 - DNA, 50 bp, synthetic construct
  source 1..50: mol_type = other DNA
tatccgaataatcgcgagaaggtcatcagcttgcggccccgccttctgcg

SEQ ID NO: 52727 - DNA, 50 bp, synthetic construct
  source 1..50: mol_type = other DNA
tatgctatttgtacttacactttctgtagctcaacggtagagcaggaagc

SEQ ID NO: 52728 - DNA, 50 bp, synthetic construct
  source 1..50: mol_type = other DNA
ttattcgtatatttgatacaatccaaaataggtatcaaacttcgtataaa

SEQ ID NO: 52729 - DNA, 50 bp, synthetic construct
  source 1..50: mol_type = other DNA
aaacttaaatatatattcacatcctttattgaatgtaagtaaatcagtac

SEQ ID NO: 52730 - DNA, 50 bp, synthetic construct
  source 1..50: mol_type = other DNA
gacaaactaattcgacctgataaattcacgcgcacctcaccacgttcaaa

SEQ ID NO: 52731 - DNA, 50 bp, synthetic construct
  source 1..50: mol_type = other DNA
taaaaaagctgtgaaggttgaggaaattcctaaccttttcagctttttct

SEQ ID NO: 52732 - DNA, 50 bp, synthetic construct
  source 1..50: mol_type = other DNA
gagtggaggttttttaattttcaaattcagatattaagattattgcacaa

SEQ ID NO: 52733 - DNA, 50 bp, synthetic construct
  source 1..50: mol_type = other DNA
cctagagaacgctaccatgtggccgggggcttgggctctggtaaggttaa

SEQ ID NO: 52734 - DNA, 50 bp, synthetic construct
  source 1..50: mol_type = other DNA
gtgagcaattttgaaaacgatatacctatatcgttatcaaaaatgcacat

SEQ ID NO: 52735 - DNA, 50 bp, synthetic construct
  source 1..50: mol_type = other DNA
cgttttcttttaatttttcaatcaacattatacaaacataaaagaaagac

SEQ ID NO: 52736 - DNA, 50 bp, synthetic construct
  source 1..50: mol_type = other DNA
atctcgatttatcaatctactgggtacctgattcgcagacttatcgtcta

SEQ ID NO: 52737 - DNA, 50 bp, synthetic construct
  source 1..50: mol_type = other DNA
gcttaattatctcattcattggctaccaccaatcaagagaatatatctcc

SEQ ID NO: 52738 - DNA, 50 bp, synthetic construct
  source 1..50: mol_type = other DNA
tggtatcgcatactgtgaaaaacataggattttctcctttggttttaact

SEQ ID NO: 52739 - DNA, 50 bp, synthetic construct
  source 1..50: mol_type = other DNA
aaacctcttttccttaccactcaactcaaggggagggggaggaaaatcct

SEQ ID NO: 52740 - DNA, 50 bp, synthetic construct
  source 1..50: mol_type = other DNA
gcggtggtgacggttcatgtttgaatccaaatgagaactgtcaccgaaat

SEQ ID NO: 52741 - DNA, 50 bp, synthetic construct
  source 1..50: mol_type = other DNA
gacagttgtttagttggcagcaaatacccgctgcccaatacagcggattc

SEQ ID NO: 52742 - DNA, 50 bp, synthetic construct
  source 1..50: mol_type = other DNA
aaccgcggccgaaaacagattaaggccgtattcgttttcaagtagatttg

SEQ ID NO: 52743 - DNA, 50 bp, synthetic construct
  source 1..50: mol_type = other DNA
ctcctttcggctgtgaagccgaagcggagataacctccagcggcagggag

SEQ ID NO: 52744 - DNA, 50 bp, synthetic construct
  source 1..50: mol_type = other DNA
cgcggacttccttgctgaccggaatcttcttagtcgttttcggcatggcg

SEQ ID NO: 52745 - DNA, 50 bp, synthetic construct
  source 1..50: mol_type = other DNA
gtcacattgtaaaaagcctggggcgcggccgagtttaagggttttgccgc

SEQ ID NO: 52746 - DNA, 50 bp, synthetic construct
  source 1..50: mol_type = other DNA
tggaaaaagcataaaaatagtgataacactttatgaagacccttttaccc

SEQ ID NO: 52747 - DNA, 50 bp, synthetic construct
  source 1..50: mol_type = other DNA
gtagatacaattctaagcaacatttatggattaacaactccttcttcatc

SEQ ID NO: 52748 - DNA, 50 bp, synthetic construct
  source 1..50: mol_type = other DNA
ttaaccttcccactcaaaaggcctgaatgccttgtcatcatgaaggatga

SEQ ID NO: 52749 - DNA, 50 bp, synthetic construct
  source 1..50: mol_type = other DNA
aagataaatgaagttaacaacaaaatacagtttgtttctgtaaaaccgac

SEQ ID NO: 52750 - DNA, 50 bp, synthetic construct
  source 1..50: mol_type = other DNA
agcttgaagaatcggaatccgttgatcacccgcagcccatgcgtcctgct

SEQ ID NO: 52751 - DNA, 50 bp, synthetic construct
  source 1..50: mol_type = other DNA
gagatttccaatggctcataaatcgatggttatgagaataaggaaatctt

SEQ ID NO: 52752 - DNA, 50 bp, synthetic construct
  source 1..50: mol_type = other DNA
ttgttttcctgatcaaaaaggtttcattttcattttcctcgtatagtagt

SEQ ID NO: 52753 - DNA, 50 bp, synthetic construct
  source 1..50: mol_type = other DNA
ccaagcccattcgagtttgggatcccgatgggcgtttttctctcaaccaa

SEQ ID NO: 52754 - DNA, 50 bp, synthetic construct
  source 1..50: mol_type = other DNA
cactacaacggcgcttcttattggcttcaattagccgccggcgaatttcc

SEQ ID NO: 52755 - DNA, 50 bp, synthetic construct
  source 1..50: mol_type = other DNA
ttacctccggtcctgcagcacagcgacctgtgttccatcctctgcggtgt

SEQ ID NO: 52756 - DNA, 50 bp, synthetic construct
  source 1..50: mol_type = other DNA
gatgagcacgacgacgaagaacacgcgtgttcttcctcgtgccctcgtcg

SEQ ID NO: 52757 - DNA, 50 bp, synthetic construct
  source 1..50: mol_type = other DNA
atggcgcaaagtggtttgggtatttgacgttccctcgtttgttgcgcggc

SEQ ID NO: 52758 - DNA, 50 bp, synthetic construct
  source 1..50: mol_type = other DNA
tccagctttcacgccgtgaacggtcttgccgagccgcttgcgctgctgcc

SEQ ID NO: 52759 - DNA, 50 bp, synthetic construct
  source 1..50: mol_type = other DNA
ggggtacatattcgctctaaagggcgaagtcctcggcgtcaatgattcca

SEQ ID NO: 52760 - DNA, 50 bp, synthetic construct
  source 1..50: mol_type = other DNA
cttgcctaatttatcacttaatttttagatttattgtataattatctcag

SEQ ID NO: 52761 - DNA, 50 bp, synthetic construct
  source 1..50: mol_type = other DNA
aaagatttggaatgaaaatgcgcgatcaactcttatatcaggattcttcg

SEQ ID NO: 52762 - DNA, 50 bp, synthetic construct
  source 1..50: mol_type = other DNA
tgtaagacataccacaaatacggacgctatgattgtcggtataacctgta

SEQ ID NO: 52763 - DNA, 50 bp, synthetic construct
  source 1..50: mol_type = other DNA
ttaactcctcttactaggagactatttcttctgccagactgctgaaagcg

SEQ ID NO: 52764 - DNA, 50 bp, synthetic construct
  source 1..50: mol_type = other DNA
catagccgactggacagcggtacactggctgtcatttcacatcgcctatg

SEQ ID NO: 52765 - DNA, 50 bp, synthetic construct
  source 1..50: mol_type = other DNA
gaagcattattcaccaattttataaatatacttgtcaaaattgatttaat

SEQ ID NO: 52766 - DNA, 50 bp, synthetic construct
  source 1..50: mol_type = other DNA
aaatggaatgaatgtacgatgataattattaatgtacttttattccccac

SEQ ID NO: 52767 - DNA, 50 bp, synthetic construct
  source 1..50: mol_type = other DNA
tctccctcgcggcggctctcatctcgaaatgagggataataataggacga

SEQ ID NO: 52768 - DNA, 50 bp, synthetic construct
  source 1..50: mol_type = other DNA
cgttcgtgtcgaaagcccgctttccgccgagatgatgggcgtgacggcgg

SEQ ID NO: 52769 - DNA, 50 bp, synthetic construct
  source 1..50: mol_type = other DNA
gcacattctcaaaccgttgtaaatacaatccgaattgcttatcacatttg

SEQ ID NO: 52770 - DNA, 50 bp, synthetic construct
  source 1..50: mol_type = other DNA
ggcgaagctggacaggttcttatcggttctcaaagctgttgagctgctcg

SEQ ID NO: 52771 - DNA, 50 bp, synthetic construct
  source 1..50: mol_type = other DNA
ccagaggacagccgcctgaaagcaggtgcccctgcccggcgtgctgctgc

SEQ ID NO: 52772 - DNA, 50 bp, synthetic construct
  source 1..50: mol_type = other DNA
acatcaagtccatatgttaatcgaattatttgccgatattgacttgatat

SEQ ID NO: 52773 - DNA, 50 bp, synthetic construct
  source 1..50: mol_type = other DNA
tcattagtattttttacctttcagtctaactagaggcaaaatactaatgg

SEQ ID NO: 52774 - DNA, 50 bp, synthetic construct
  source 1..50: mol_type = other DNA
tcgcgttatatgcccatttaataacgttgagacgcgggcataggctgcca

SEQ ID NO: 52775 - DNA, 50 bp, synthetic construct
  source 1..50: mol_type = other DNA
gctgacgcaacacttccaaaacagagcgattttggtcctaatgtatggga

SEQ ID NO: 52776 - DNA, 50 bp, synthetic construct
  source 1..50: mol_type = other DNA
taaaaagtgggtgaggggaatttgttgctgattttcttcgatttattttt

SEQ ID NO: 52777 - DNA, 50 bp, synthetic construct
  source 1..50: mol_type = other DNA
ttgccaactccacattcatctgcacgtagtggagtgcaagggtttggtgg

SEQ ID NO: 52778 - DNA, 50 bp, synthetic construct
  source 1..50: mol_type = other DNA
tcttttgctacttgttttcttttacaactaaggaaaggagcgcaaaacaa

SEQ ID NO: 52779 - DNA, 50 bp, synthetic construct
  source 1..50: mol_type = other DNA
acaatctatacaaataaaatacaatatcttttttatattttaaatcttta

SEQ ID NO: 52780 - DNA, 50 bp, synthetic construct
  source 1..50: mol_type = other DNA
tatacacaccgtttttttatcaatatacgcctaaaaatataggcattaat

SEQ ID NO: 52781 - DNA, 50 bp, synthetic construct
  source 1..50: mol_type = other DNA
gagccgagtattatcgataataaaattttagcccactctatgcaaacata

SEQ ID NO: 52782 - DNA, 50 bp, synthetic construct
  source 1..50: mol_type = other DNA
agtagaaagccttttgtttgctgcctttttcaacgaaaagggggtctata

SEQ ID NO: 52783 - DNA, 50 bp, synthetic construct
  source 1..50: mol_type = other DNA
aaaacagtcctttcagtttaataaaatctgccttcctaaaggcagatttg

SEQ ID NO: 52784 - DNA, 50 bp, synthetic construct
  source 1..50: mol_type = other DNA
acaatgaccgtgttgcccgcatccacacgcctgctgagcaatttcattgt

SEQ ID NO: 52785 - DNA, 50 bp, synthetic construct
  source 1..50: mol_type = other DNA
cgacttatatataataacaaaaaatatttttatgcctaaaacagaagaaa

SEQ ID NO: 52786 - DNA, 50 bp, synthetic construct
  source 1..50: mol_type = other DNA
tagaaatcaaatagaaaaatatttttaaatattattttatactattatat

SEQ ID NO: 52787 - DNA, 50 bp, synthetic construct
  source 1..50: mol_type = other DNA
aatattttttaaaatccggaaattataatcttcatgttttaagatgtatt

SEQ ID NO: 52788 - DNA, 50 bp, synthetic construct
  source 1..50: mol_type = other DNA
aaaatatttaataaatcaacataatattacaaagagttcttaaatattta

SEQ ID NO: 52789 - DNA, 50 bp, synthetic construct
  source 1..50: mol_type = other DNA
taaatatttaagaactctttgtaatattatgttgatttattaaatatttt

SEQ ID NO: 52790 - DNA, 50 bp, synthetic construct
  source 1..50: mol_type = other DNA
tctaatttttactttactactgtcgctatggaagtaaagggagaattata

SEQ ID NO: 52791 - DNA, 50 bp, synthetic construct
  source 1..50: mol_type = other DNA
atattttaaaagcctataacatttagaagagtctgagctttataaaatgt

SEQ ID NO: 52792 - DNA, 50 bp, synthetic construct
  source 1..50: mol_type = other DNA
gaagagtgctgataaaactccacacgtaatccgttctatgcttcaacttc

SEQ ID NO: 52793 - DNA, 50 bp, synthetic construct
  source 1..50: mol_type = other DNA
tatatacgggcaaagaatggtgagaatattccattctctatccatatatt

SEQ ID NO: 52794 - DNA, 50 bp, synthetic construct
  source 1..50: mol_type = other DNA
aatgaaaggtgctaatgctaatcctaacattaataccaaccactttctat

SEQ ID NO: 52795 - DNA, 50 bp, synthetic construct
  source 1..50: mol_type = other DNA
caagctccatatttcctatgctttaaaaaggggagataatatgagaattg

SEQ ID NO: 52796 - DNA, 50 bp, synthetic construct
  source 1..50: mol_type = other DNA
tatccagtcgttttgcccacaatctgtggtgacggcggcatgcttggcag

SEQ ID NO: 52797 - DNA, 50 bp, synthetic construct
  source 1..50: mol_type = other DNA
aggatgtaattatctaatttattaaatttgatattagatactggcatgag

SEQ ID NO: 52798 - DNA, 50 bp, synthetic construct
  source 1..50: mol_type = other DNA
catcatatatattaatttttcacaattttgaaagaggtactactatgatg

SEQ ID NO: 52799 - DNA, 50 bp, synthetic construct
  source 1..50: mol_type = other DNA
tctcccaagtgcataaagaaagccccgactgcaggactgcatttcacacc

SEQ ID NO: 52800 - DNA, 50 bp, synthetic construct
  source 1..50: mol_type = other DNA
attagttttatccttatattcaccaaaatgaataacagaatagacgcaat

SEQ ID NO: 52801 - DNA, 50 bp, synthetic construct
  source 1..50: mol_type = other DNA
catcagctattgtcagcccgatgtcgattacgttattataatgacatatg

SEQ ID NO: 52802 - DNA, 50 bp, synthetic construct
  source 1..50: mol_type = other DNA
gccgggtcgataaagggataggcgtactccaccacttggcgcacattggg

SEQ ID NO: 52803 - DNA, 50 bp, synthetic construct
  source 1..50: mol_type = other DNA
cagcaggaaagcactctcaactatcatagaataagaaaacacgcctgctg

SEQ ID NO: 52804 - DNA, 50 bp, synthetic construct
  source 1..50: mol_type = other DNA
aagtttttattccaactaatatagaaataaatatattgaaataaaagcat

SEQ ID NO: 52805 - DNA, 50 bp, synthetic construct
  source 1..50: mol_type = other DNA
tttaagattatgataattacagaaattcacttagttcaccatatagaaaa

SEQ ID NO: 52806 - DNA, 50 bp, synthetic construct
  source 1..50: mol_type = other DNA
tttcattgaaaaagtccgtccgtttaaatttctttacttcatcttccaaa

SEQ ID NO: 52807 - DNA, 50 bp, synthetic construct
  source 1..50: mol_type = other DNA
attgaaaatttattataagtaggctaataaaaatctaacaaatttttgat

SEQ ID NO: 52808 - DNA, 50 bp, synthetic construct
  source 1..50: mol_type = other DNA
tatagacggaaagactttatatatttgaatagaaatatatttaatctatc

SEQ ID NO: 52809 - DNA, 50 bp, synthetic construct
  source 1..50: mol_type = other DNA
cttggacggaattatccactttgggtaaggatactggcgtctcctacgta

SEQ ID NO: 52810 - DNA, 50 bp, synthetic construct
  source 1..50: mol_type = other DNA
ttattatttcgcatgtggctgatctggatagagcgtttgactacgaatca

SEQ ID NO: 52811 - DNA, 50 bp, synthetic construct
  source 1..50: mol_type = other DNA
ctgaggtttttcgctgtctgcataaattataagagtatctttaataacaa

SEQ ID NO: 52812 - DNA, 50 bp, synthetic construct
  source 1..50: mol_type = other DNA
tataaaaaatacacccattgcaagagcatgtaatggctgtcgttgaagta

SEQ ID NO: 52813 - DNA, 50 bp, synthetic construct
  source 1..50: mol_type = other DNA
ttacatattaattataacatttattggaagatgaaataatttataattct

SEQ ID NO: 52814 - DNA, 50 bp, synthetic construct
  source 1..50: mol_type = other DNA
aaagttataatatatatttataattaattatataataacactttaagttt

SEQ ID NO: 52815 - DNA, 50 bp, synthetic construct
  source 1..50: mol_type = other DNA
tactccaaggagtcagcatttacccgggtatactaatggagctgtgagcg

SEQ ID NO: 52816 - DNA, 50 bp, synthetic construct
  source 1..50: mol_type = other DNA
ttcaaaatgccctgttcttccagacgggcgcaggagccggagctcgtgga

SEQ ID NO: 52817 - DNA, 50 bp, synthetic construct
  source 1..50: mol_type = other DNA
gggcgctttgccgtttgcagcagcagaccgaagcaaccggcagtccgccg

SEQ ID NO: 52818 - DNA, 50 bp, synthetic construct
  source 1..50: mol_type = other DNA
tgccatgtgaacaactatatcacctagaggattgtattgatgacatgctg

SEQ ID NO: 52819 - DNA, 50 bp, synthetic construct
  source 1..50: mol_type = other DNA
ctttgtcatcgtaaataactactgattaaacaagcttaatgttgagaaag

SEQ ID NO: 52820 - DNA, 50 bp, synthetic construct
  source 1..50: mol_type = other DNA
tactataacggtatcctctatatcacccttaaaagtctagcgttatcgtc

SEQ ID NO: 52821 - DNA, 50 bp, synthetic construct
  source 1..50: mol_type = other DNA
tacaataagtactacctgctttcttttctttattaatagtatcttctgtt

SEQ ID NO: 52822 - DNA, 50 bp, synthetic construct
  source 1..50: mol_type = other DNA
tgttcttgataaataaaaatataaattttgtttattttttgaaaagatag

SEQ ID NO: 52823 - DNA, 50 bp, synthetic construct
  source 1..50: mol_type = other DNA
ttctcataaaagatatggtcgattccgcaagggtttattttttatactct

SEQ ID NO: 52824 - DNA, 50 bp, synthetic construct
  source 1..50: mol_type = other DNA
aaatatcatcctttccgtaaaaatgagtcgagggcagcgagatgaatttt

SEQ ID NO: 52825 - DNA, 50 bp, synthetic construct
  source 1..50: mol_type = other DNA
cattaattattactcctttctttgtaaaattccatgaataatcccttatt

SEQ ID NO: 52826 - DNA, 50 bp, synthetic construct
  source 1..50: mol_type = other DNA
aaaaatcggagtaaagaactttgatataaaagtggctgtatgaggcacac

SEQ ID NO: 52827 - DNA, 50 bp, synthetic construct
  source 1..50: mol_type = other DNA
cctcctttccgtacgtctatacatcagattattgatttttggaatgattt

SEQ ID NO: 52828 - DNA, 50 bp, synthetic construct
  source 1..50: mol_type = other DNA
ttcaatgaggctgtagaggtattctgcctgtaaccaacaggggaaaagag

SEQ ID NO: 52829 - DNA, 50 bp, synthetic construct
  source 1..50: mol_type = other DNA
cctatataaatacccaacaaatgttaacatttgttggatggagaaaaaac

SEQ ID NO: 52830 - DNA, 50 bp, synthetic construct
  source 1..50: mol_type = other DNA
caggagtaacttaattttttattatataatatattggtatgttaatagtg

SEQ ID NO: 52831 - DNA, 50 bp, synthetic construct
  source 1..50: mol_type = other DNA
ggaagtcttagcaaacttcaaaaatattaatgaaggctgccatctattca

SEQ ID NO: 52832 - DNA, 50 bp, synthetic construct
  source 1..50: mol_type = other DNA
tgccgtgcaaccggcctgccagccgatgctggcacgacggctgcccggga

SEQ ID NO: 52833 - DNA, 50 bp, synthetic construct
  source 1..50: mol_type = other DNA
ctctttgtcccattatttactttttccatccataatttcctacctttctt

SEQ ID NO: 52834 - DNA, 50 bp, synthetic construct
  source 1..50: mol_type = other DNA
tacatacattttcattcataggtaaagaagcatgacagcaaagcacccta

SEQ ID NO: 52835 - DNA, 50 bp, synthetic construct
  source 1..50: mol_type = other DNA
ggcataaaaaaacacgctccttttagaaaaggtttcctctaaaacatctt

SEQ ID NO: 52836 - DNA, 50 bp, synthetic construct
  source 1..50: mol_type = other DNA
atcagaacaggatagagatgtaaatatcggcggttccggatatgactgcg

SEQ ID NO: 52837 - DNA, 50 bp, synthetic construct
  source 1..50: mol_type = other DNA
gggtttgcaatcctgcccgcaaggtgcccggcgtacaggattgctgtggg

SEQ ID NO: 52838 - DNA, 50 bp, synthetic construct
  source 1..50: mol_type = other DNA
taattttcgtattcttgtttgtacttcacaaaataaagtgaataatgtca

SEQ ID NO: 52839 - DNA, 50 bp, synthetic construct
  source 1..50: mol_type = other DNA
tatccacgttctaataaaaccccatatcggcagtcatgaaaactgggaac

SEQ ID NO: 52840 - DNA, 50 bp, synthetic construct
  source 1..50: mol_type = other DNA
aattagactacgttcgatattttttttaaaaaatattcaccagtaggaga

SEQ ID NO: 52841 - DNA, 50 bp, synthetic construct
  source 1..50: mol_type = other DNA
cgggtagcggcctatgcccgcgtctccacacgggaataccgggaggacca

SEQ ID NO: 52842 - DNA, 50 bp, synthetic construct
  source 1..50: mol_type = other DNA
catcatcgaccccgccgagtggaagctggacgccggagatgaaggaaatc

SEQ ID NO: 52843 - DNA, 50 bp, synthetic construct
  source 1..50: mol_type = other DNA
attatatttatagtataagggtgtttataaatatatattatatatataga

SEQ ID NO: 52844 - DNA, 50 bp, synthetic construct
  source 1..50: mol_type = other DNA
taatgtggttaaaacagttaaagatgtctttagaacaaatagcaacttat

SEQ ID NO: 52845 - DNA, 50 bp, synthetic construct
  source 1..50: mol_type = other DNA
tttaataaaaacaggtttattaactagttataggagaaaagaagaattaa

SEQ ID NO: 52846 - DNA, 50 bp, synthetic construct
  source 1..50: mol_type = other DNA
aaaagagtgaatgcttgtactgatttatagatactctttccaacctattt

SEQ ID NO: 52847 - DNA, 50 bp, synthetic construct
  source 1..50: mol_type = other DNA
atcttctgaattgcttttggatggattatgcaaaaagaaaaagtaatacc

SEQ ID NO: 52848 - DNA, 50 bp, synthetic construct
  source 1..50: mol_type = other DNA
tgatttatttaaaaatagtatttctggaaatactatatttaagggtattt

SEQ ID NO: 52849 - DNA, 50 bp, synthetic construct
  source 1..50: mol_type = other DNA
taaataaccggataaaaggttgggtcgcccgactttgtctacattattat

SEQ ID NO: 52850 - DNA, 50 bp, synthetic construct
  source 1..50: mol_type = other DNA
gtcatgacatcgaacagttccctgttttcagaacagatcgagggcatcac

SEQ ID NO: 52851 - DNA, 50 bp, synthetic construct
  source 1..50: mol_type = other DNA
gaaatgataccctctttattgtagtacagccttttagagtgatgtatggt

SEQ ID NO: 52852 - DNA, 50 bp, synthetic construct
  source 1..50: mol_type = other DNA
cgtcaacgctacatgaaggaacaccggtgcctttatatgtggcgtcatcg

SEQ ID NO: 52853 - DNA, 50 bp, synthetic construct
  source 1..50: mol_type = other DNA
cctgggcggcagcagacggactgtgtagcgaagatcttcatgcaagcttc

SEQ ID NO: 52854 - DNA, 50 bp, synthetic construct
  source 1..50: mol_type = other DNA
cagcgatcatgcagtcgaaaaggcggccattttgcagagcaagatcgcgg

SEQ ID NO: 52855 - DNA, 50 bp, synthetic construct
  source 1..50: mol_type = other DNA
cctatccgacacagtagctaagtgccgaaataaaacgcgatcaccataag

SEQ ID NO: 52856 - DNA, 50 bp, synthetic construct
  source 1..50: mol_type = other DNA
gctctgcgctcatctgtccacatggccatccttgccattgacggcgatta

SEQ ID NO: 52857 - DNA, 50 bp, synthetic construct
  source 1..50: mol_type = other DNA
gaccacgtaaacgccaatctgatggtacgccaattggcgttgacgtgaac

SEQ ID NO: 52858 - DNA, 50 bp, synthetic construct
  source 1..50: mol_type = other DNA
gccgttcggctatcagatgcgcatggcttcgcccccaacagccaaacggc

SEQ ID NO: 52859 - DNA, 50 bp, synthetic construct
  source 1..50: mol_type = other DNA
aaaaaacgcaagaagcggacagcaaacgatgggaggattaggatgaaaca

SEQ ID NO: 52860 - DNA, 50 bp, synthetic construct
  source 1..50: mol_type = other DNA
ttctgccctggagcggtctgcccatcggcgcaaatatcgatgcggttgaa

SEQ ID NO: 52861 - DNA, 50 bp, synthetic construct
  source 1..50: mol_type = other DNA
tccagatacaagggggtgtggcaatgcgacccgccgcttttgtattgcca

SEQ ID NO: 52862 - DNA, 50 bp, synthetic construct
  source 1..50: mol_type = other DNA
ttacaaaattagcatagcgtccccaaagcccctgcatggggcttttcgct

SEQ ID NO: 52863 - DNA, 50 bp, synthetic construct
  source 1..50: mol_type = other DNA
gacattctccgagaagccgttcaggtacgaaaaaggaatttgactgggtg

SEQ ID NO: 52864 - DNA, 50 bp, synthetic construct
  source 1..50: mol_type = other DNA
ggatgtttccggtttcttaattgcaggagaaaaaagcatggcaaaaaaag

SEQ ID NO: 52865 - DNA, 50 bp, synthetic construct
  source 1..50: mol_type = other DNA
tttttcacctcctgatttttttacggatacaaggattaggagggagagca

SEQ ID NO: 52866 - DNA, 50 bp, synthetic construct
  source 1..50: mol_type = other DNA
acaggggtctgcctcacacccggtctgccgggaaggaggacttatgcagt

SEQ ID NO: 52867 - DNA, 50 bp, synthetic construct
  source 1..50: mol_type = other DNA
tctcatcccgccaaggctctgccggcatcgtgtacccgtatgggatgtac

SEQ ID NO: 52868 - DNA, 50 bp, synthetic construct
  source 1..50: mol_type = other DNA
cggtcggtcacagtcattccgccgacctccggtgtgaattgatccagcat

SEQ ID NO: 52869 - DNA, 50 bp, synthetic construct
  source 1..50: mol_type = other DNA
aaagaccgcaggtttcaacgcctgcggttcggatggcctgtgccgtcctt

SEQ ID NO: 52870 - DNA, 50 bp, synthetic construct
  source 1..50: mol_type = other DNA
gctgcagagccctcatgctttgcatattaaaagcattggatgtctgatac

SEQ ID NO: 52871 - DNA, 50 bp, synthetic construct
  source 1..50: mol_type = other DNA
ttggcttttcttcagtatggcttcgggagcagataaattagaaaagttaa

SEQ ID NO: 52872 - DNA, 50 bp, synthetic construct
  source 1..50: mol_type = other DNA
gtgatacggcggacgctctcgtggagctcaaatacctgcccccgcatcag

SEQ ID NO: 52873 - DNA, 50 bp, synthetic construct
  source 1..50: mol_type = other DNA
tagctacccagctatgcccttggcagccgaagggccgtttccggttgctc

SEQ ID NO: 52874 - DNA, 50 bp, synthetic construct
  source 1..50: mol_type = other DNA
attcattctattcgattatcaaggttccacacccaccgaatgtaacgcac

SEQ ID NO: 52875 - DNA, 50 bp, synthetic construct
  source 1..50: mol_type = other DNA
tgtttctcaggatgatttttcagaaaggtgaaagggtatccaagaaaaca

SEQ ID NO: 52876 - DNA, 50 bp, synthetic construct
  source 1..50: mol_type = other DNA
tcaacaactttttttattttcgtattcttgacttagcaaaatacttgtga

SEQ ID NO: 52877 - DNA, 50 bp, synthetic construct
  source 1..50: mol_type = other DNA
ctcctcggtctggcgtggcatttggcacaatgcgttgcctgctccaggag

SEQ ID NO: 52878 - DNA, 50 bp, synthetic construct
  source 1..50: mol_type = other DNA
acagcatctcctcagtcagagaatttctgctccgtgataggcgtagctgt

SEQ ID NO: 52879 - DNA, 50 bp, synthetic construct
  source 1..50: mol_type = other DNA
cttcgatacaacgcggatagaacttcagacctaacgatgtacaaacgaat

SEQ ID NO: 52880 - DNA, 50 bp, synthetic construct
  source 1..50: mol_type = other DNA
cagtttttgatataattgacattgatacatacggtgaatggaaaactgaa

SEQ ID NO: 52881 - DNA, 50 bp, synthetic construct
  source 1..50: mol_type = other DNA
tgacaataatgatattacgcagatgcattgcaaaaattgtgatgaggtta

SEQ ID NO: 52882 - DNA, 50 bp, synthetic construct
  source 1..50: mol_type = other DNA
gagttgcaaaagagtgacgaaacatatgtagtattgttggtttgcaaaaa

SEQ ID NO: 52883 - DNA, 50 bp, synthetic construct
  source 1..50: mol_type = other DNA
gcacgttttttatcaagccgtgaaatcaaggtacggaatagtggggctgg

SEQ ID NO: 52884 - DNA, 50 bp, synthetic construct
  source 1..50: mol_type = other DNA
agctttgtgctgcggcaggcggacgcggaatactatgcccagacggttta

SEQ ID NO: 52885 - DNA, 50 bp, synthetic construct
  source 1..50: mol_type = other DNA
ggaagaccagctccatagttttgaggcatgtattatgcagcatgtgaaga

SEQ ID NO: 52886 - DNA, 50 bp, synthetic construct
  source 1..50: mol_type = other DNA
acttgtacatctgctgaatttgatggattaaatgtcagggatgagtcggt

SEQ ID NO: 52887 - DNA, 50 bp, synthetic construct
  source 1..50: mol_type = other DNA
aggagtgcgagaccttggccgttggagaaagagaaagaggatagactcct

SEQ ID NO: 52888 - DNA, 50 bp, synthetic construct
  source 1..50: mol_type = other DNA
ctcacttcagacattaccttgtcctcagaaagtactgcgtacagagtgaa

SEQ ID NO: 52889 - DNA, 50 bp, synthetic construct
  source 1..50: mol_type = other DNA
agctttttgttatgctccaattggatccacgatgaaataaagaaagagaa

SEQ ID NO: 52890 - DNA, 50 bp, synthetic construct
  source 1..50: mol_type = other DNA
tttttggttggtatcatattatgataccatgccgaaaagacgagcaaacg

SEQ ID NO: 52891 - DNA, 50 bp, synthetic construct
  source 1..50: mol_type = other DNA
accagtttgccgtctacacgctccttggagcatttatacggtgattttta

SEQ ID NO: 52892 - DNA, 50 bp, synthetic construct
  source 1..50: mol_type = other DNA
agctttcggagcgtgagcggtctttcggctcatacatcggtatgcggcaa

SEQ ID NO: 52893 - DNA, 50 bp, synthetic construct
  source 1..50: mol_type = other DNA
ccctcgctgtctttgacttggcgggtcgaatactgtgcagacagcgtagg

SEQ ID NO: 52894 - DNA, 50 bp, synthetic construct
  source 1..50: mol_type = other DNA
tgatttaatttgtttgtataaccaattagatataacaagaaagtaatgaa

SEQ ID NO: 52895 - DNA, 50 bp, synthetic construct
  source 1..50: mol_type = other DNA
cacagaggaaatcggctgctgcggcgcggtacatatccggctccacgatc

SEQ ID NO: 52896 - DNA, 50 bp, synthetic construct
  source 1..50: mol_type = other DNA
gcttccattcaagctcacggtccagctgttcggcgggaaaggatggatgt

SEQ ID NO: 52897 - DNA, 50 bp, synthetic construct
  source 1..50: mol_type = other DNA
gcatcctttgatatgcctgcggagcgctgagtattcttaataaatgcttg

SEQ ID NO: 52898 - DNA, 50 bp, synthetic construct
  source 1..50: mol_type = other DNA
cactccccatccggcagaggcggaaacagtcctgagttcaaggctgagtt

SEQ ID NO: 52899 - DNA, 50 bp, synthetic construct
  source 1..50: mol_type = other DNA
aaaccgggccaggtaccattactggccatgacagaaaccgccccgaaagt

SEQ ID NO: 52900 - DNA, 50 bp, synthetic construct
  source 1..50: mol_type = other DNA
ccggcctcatatactgaggtcggggccccgtcctcggcggagtattcggg

SEQ ID NO: 52901 - DNA, 50 bp, synthetic construct
  source 1..50: mol_type = other DNA
cgtgacgatttttctttttgaaaggcggaggaatgaaaaaaatcgagccc

SEQ ID NO: 52902 - DNA, 50 bp, synthetic construct
  source 1..50: mol_type = other DNA
tggggctatcctttggttttaaacaattaaaagacaaaaaccgttaccag

SEQ ID NO: 52903 - DNA, 50 bp, synthetic construct
  source 1..50: mol_type = other DNA
ctgtctgatgattcagacggcaacaattctccaagcactgggtcagatgt

SEQ ID NO: 52904 - DNA, 50 bp, synthetic construct
  source 1..50: mol_type = other DNA
gaccacaaatcggtttatttttttgcaaaagaaaagaccacgatcacgac

SEQ ID NO: 52905 - DNA, 50 bp, synthetic construct
  source 1..50: mol_type = other DNA
gctgatttaagccggttaaagcgttaaagatgctttacgcttcatgtagc

SEQ ID NO: 52906 - DNA, 50 bp, synthetic construct
  source 1..50: mol_type = other DNA
agcctactgccgtgtgtcaacggatcaatggaagcgaaccgaagtactct

SEQ ID NO: 52907 - DNA, 50 bp, synthetic construct
  source 1..50: mol_type = other DNA
atcaggagactataaatcgattaaaaaaaagatatttatattcagagaaa

SEQ ID NO: 52908 - DNA, 50 bp, synthetic construct
  source 1..50: mol_type = other DNA
caaaatcatgcaagaaaaagaaatcgggcgctgttgtggtagtgtttgtg

SEQ ID NO: 52909 - DNA, 50 bp, synthetic construct
  source 1..50: mol_type = other DNA
ttgccacggaaactttgaacgcttcagggtcagcagggtgtccacaaagt

SEQ ID NO: 52910 - DNA, 50 bp, synthetic construct
  source 1..50: mol_type = other DNA
gaaagaatgtactgtcttagaaattgggaaaggagaaaaagcatggcaaa

SEQ ID NO: 52911 - DNA, 50 bp, synthetic construct
  source 1..50: mol_type = other DNA
gagattcgatatgagtaagactgcggcatgcaggccagataccgtatgct

SEQ ID NO: 52912 - DNA, 50 bp, synthetic construct
  source 1..50: mol_type = other DNA
tccaaaatggaattatattaaatacgtgtagtttataccgcgggattgac

SEQ ID NO: 52913 - DNA, 50 bp, synthetic construct
  source 1..50: mol_type = other DNA
agacccggagagagagggtgaattgacacgcacatggaaagaccgttcca

SEQ ID NO: 52914 - DNA, 50 bp, synthetic construct
  source 1..50: mol_type = other DNA
ggctcctttccgagggtgctttgcgcagaaagcaccccgccttgatagcg

SEQ ID NO: 52915 - DNA, 50 bp, synthetic construct
  source 1..50: mol_type = other DNA
cctttccgatactatatatcactctaaagaaatataaagaaattgatact

SEQ ID NO: 52916 - DNA, 50 bp, synthetic construct
  source 1..50: mol_type = other DNA
ggtcatgtcaaaccaccacctgcggaggtgattgtttgtttgtcacgcga

SEQ ID NO: 52917 - DNA, 50 bp, synthetic construct
  source 1..50: mol_type = other DNA
tgtgcagcttttgatgtgtctttcgtacaagacactacaaaaagtcaaca

SEQ ID NO: 52918 - DNA, 50 bp, synthetic construct
  source 1..50: mol_type = other DNA
aacgcatccattttatctttctttgtgcagaaattgaagatggcagcgta

SEQ ID NO: 52919 - DNA, 50 bp, synthetic construct
  source 1..50: mol_type = other DNA
ttccatggaaacccagtacctgccatgtgaggggcttttcttctaccgag

SEQ ID NO: 52920 - DNA, 50 bp, synthetic construct
  source 1..50: mol_type = other DNA
catgaagtaccccgttcaatctgctcgaggacgacgctacggccgtcatg

SEQ ID NO: 52921 - DNA, 50 bp, synthetic construct
  source 1..50: mol_type = other DNA
caagttggagtggtgtagcttttctagacaaataaaaccaaaccaaaatt

SEQ ID NO: 52922 - DNA, 50 bp, synthetic construct
  source 1..50: mol_type = other DNA
tgaaccatcatggcctgtgttcatcgcgcggaacgtaccccaggggttct

SEQ ID NO: 52923 - DNA, 50 bp, synthetic construct
  source 1..50: mol_type = other DNA
tcatatatacataatacaccaacattagtgtattttgtatatgtatatta

SEQ ID NO: 52924 - DNA, 50 bp, synthetic construct
  source 1..50: mol_type = other DNA
caagatactataagtataaaggcaaactaattcatacttccaagcaattg

SEQ ID NO: 52925 - DNA, 50 bp, synthetic construct
  source 1..50: mol_type = other DNA
aatcgtatacggaaaagcagtggttaagccaaaatactccagatagtgtt

SEQ ID NO: 52926 - DNA, 50 bp, synthetic construct
  source 1..50: mol_type = other DNA
gaactctgtctatcggtcttgatgaatatgcctacgggttgatagaaagt

SEQ ID NO: 52927 - DNA, 50 bp, synthetic construct
  source 1..50: mol_type = other DNA
acttttcaaagtacacggcattttgccaaaccccaaaaactttcaaaaaa

SEQ ID NO: 52928 - DNA, 50 bp, synthetic construct
  source 1..50: mol_type = other DNA
aatgatctttccactcaatggtaattatacccttttttagagggaattat

SEQ ID NO: 52929 - DNA, 50 bp, synthetic construct
  source 1..50: mol_type = other DNA
ataacagccggaaacaggaagacacggaacaaaagttcgctggctgttat

SEQ ID NO: 52930 - DNA, 50 bp, synthetic construct
  source 1..50: mol_type = other DNA
ccaactacaggattatattttttaacaaaatcttataatcatattattct

SEQ ID NO: 52931 - DNA, 50 bp, synthetic construct
  source 1..50: mol_type = other DNA
tcatatcacctttccttttttatgttatcaagcaaataattttcaacgag

SEQ ID NO: 52932 - DNA, 50 bp, synthetic construct
  source 1..50: mol_type = other DNA
cctgcagcacctcttccccggaaattcccgtaaattccaggtgcttcaat

SEQ ID NO: 52933 - DNA, 50 bp, synthetic construct
  source 1..50: mol_type = other DNA
aaatagtccttaatgttgaaaaagtaccgctttcataataattaactgtt

SEQ ID NO: 52934 - DNA, 50 bp, synthetic construct
  source 1..50: mol_type = other DNA
gataagttactgctcttgcaataatgatttatctcttgcacttacttatt

SEQ ID NO: 52935 - DNA, 50 bp, synthetic construct
  source 1..50: mol_type = other DNA
tgtagcggcatacaatgatgaatttaatattagggggatatatggcaaca

SEQ ID NO: 52936 - DNA, 50 bp, synthetic construct
  source 1..50: mol_type = other DNA
cgtaggactttctgttcatagaccggattttaagaacatctctatattca

SEQ ID NO: 52937 - DNA, 50 bp, synthetic construct
  source 1..50: mol_type = other DNA
atatcaaagctatatacaatcttgattcaagatgcttatcagcttaatat

SEQ ID NO: 52938 - DNA, 50 bp, synthetic construct
  source 1..50: mol_type = other DNA
gccacgtttttccctccatctctgtactgagtttaatacaatgccgtgga

SEQ ID NO: 52939 - DNA, 50 bp, synthetic construct
  source 1..50: mol_type = other DNA
taaagccttcaaaattattatcgttttcgccaataatttaaccatatttg

SEQ ID NO: 52940 - DNA, 50 bp, synthetic construct
  source 1..50: mol_type = other DNA
cggttgccgttccattgggtgccggtcggccacccagatgttggttccgt

SEQ ID NO: 52941 - DNA, 50 bp, synthetic construct
  source 1..50: mol_type = other DNA
agtgttggccagccgaaaaaggacttttgcttcttggcaaggccatgact

SEQ ID NO: 52942 - DNA, 50 bp, synthetic construct
  source 1..50: mol_type = other DNA
acaaagcgcgtctgtaatcacaggctgctgtgttcactttttgggtgtgt

SEQ ID NO: 52943 - DNA, 50 bp, synthetic construct
  source 1..50: mol_type = other DNA
tgccgccacatagcaagtcattctcgcggcgccattttcctgtggcggct

SEQ ID NO: 52944 - DNA, 50 bp, synthetic construct
  source 1..50: mol_type = other DNA
acaaaaacgccagaaaagctgaatgctgtattttttatacccatttttgt

SEQ ID NO: 52945 - DNA, 50 bp, synthetic construct
  source 1..50: mol_type = other DNA
tatgccagcaacagtaaccgcaccaaaattcacaagctgacgctggaatc

SEQ ID NO: 52946 - DNA, 50 bp, synthetic construct
  source 1..50: mol_type = other DNA
gctacatactttttcataggctttattggcacaatggcaaaggccagaat

SEQ ID NO: 52947 - DNA, 50 bp, synthetic construct
  source 1..50: mol_type = other DNA
cactttgactggttttatataaaaattttaatataaagtagcataagaaa

SEQ ID NO: 52948 - DNA, 50 bp, synthetic construct
  source 1..50: mol_type = other DNA
gttgcatatatcttctcctttcttgtttgggtttgcctgataattgcagt

SEQ ID NO: 52949 - DNA, 50 bp, synthetic construct
  source 1..50: mol_type = other DNA
accaatatgtaaagcgtttgatgaaaagatatagaaaaaaactctatatc

SEQ ID NO: 52950 - DNA, 50 bp, synthetic construct
  source 1..50: mol_type = other DNA
attttgtcaactgaactcaaactgtccaatttcagttctcctgacaaaat

SEQ ID NO: 52951 - DNA, 50 bp, synthetic construct
  source 1..50: mol_type = other DNA
gcaccgctcgccagggcttcccgcgcatcgatacgcctcccgggcggtgc

SEQ ID NO: 52952 - DNA, 50 bp, synthetic construct
  source 1..50: mol_type = other DNA
acattcatcgtaaatcttcctttcttgaaatgaattttattgatattcgt

SEQ ID NO: 52953 - DNA, 50 bp, synthetic construct
  source 1..50: mol_type = other DNA
ctgttgcagccattatttatctctcctttactttttaagtcaccacgcaa

SEQ ID NO: 52954 - DNA, 50 bp, synthetic construct
  source 1..50: mol_type = other DNA
tcttatggtatatatcactctaaacattttggcaaagaaaaaagatagta

SEQ ID NO: 52955 - DNA, 50 bp, synthetic construct
  source 1..50: mol_type = other DNA
cggtatgacagaaaagaagaaaaagaagaaagcacttgtgaatgcagaac

SEQ ID NO: 52956 - DNA, 50 bp, synthetic construct
  source 1..50: mol_type = other DNA
agaaagacattgcttcgccggaggatcatgtgaagagcatggtcctttta

SEQ ID NO: 52957 - DNA, 50 bp, synthetic construct
  source 1..50: mol_type = other DNA
tcaacacgaacgatttgatgaattttgcccaatacaatcggtccgttcat

SEQ ID NO: 52958 - DNA, 50 bp, synthetic construct
  source 1..50: mol_type = other DNA
tcgcggcaatcttgctatctgccccggcggattcacgagtatgtcgaaga

SEQ ID NO: 52959 - DNA, 50 bp, synthetic construct
  source 1..50: mol_type = other DNA
gtgcagctataagtaactcttccgttccgatttgggattttggggagcga

SEQ ID NO: 52960 - DNA, 50 bp, synthetic construct
  source 1..50: mol_type = other DNA
atcgtttccatgatttttccaattagtgtaggcaaaaacaaatgaaaaaa

SEQ ID NO: 52961 - DNA, 50 bp, synthetic construct
  source 1..50: mol_type = other DNA
atttgagtttagataatgtgcgctataggtagcagtgccgatcgtcagtt

SEQ ID NO: 52962 - DNA, 50 bp, synthetic construct
  source 1..50: mol_type = other DNA
ttaatacttcaacgactgtcagttataccttttattaacacaaaaattaa

SEQ ID NO: 52963 - DNA, 50 bp, synthetic construct
  source 1..50: mol_type = other DNA
ctgcactctcgaagaaatgaccgagaccgcccatggaatccatagaagag

SEQ ID NO: 52964 - DNA, 50 bp, synthetic construct
  source 1..50: mol_type = other DNA
atcatcgacccgcaaaagcgggtcattcactgctatgacttctgatggaa

SEQ ID NO: 52965 - DNA, 50 bp, synthetic construct
  source 1..50: mol_type = other DNA
tgcttcatagctcaaaactgaaaaaggttcaatatgctcgttatttttgt

SEQ ID NO: 52966 - DNA, 50 bp, synthetic construct
  source 1..50: mol_type = other DNA
gtagcgaataccttcgtgccaaagggctttgacggtaacatgtcacgtac

SEQ ID NO: 52967 - DNA, 50 bp, synthetic construct
  source 1..50: mol_type = other DNA
ttgatatccttcctcattcaaagtatccatttatgcaggcagaatatgcc

SEQ ID NO: 52968 - DNA, 50 bp, synthetic construct
  source 1..50: mol_type = other DNA
caagttcctcaattttattatcaatgttagcaataaaaccttttaacgaa

SEQ ID NO: 52969 - DNA, 50 bp, synthetic construct
  source 1..50: mol_type = other DNA
ggatttttttcgaatcaatctcccaagggagaatattgtacaaaaaaata

SEQ ID NO: 52970 - DNA, 50 bp, synthetic construct
  source 1..50: mol_type = other DNA
ttttcctgcccgccaccgaactgccaggatgccaccgatggaaaccaccg

SEQ ID NO: 52971 - DNA, 50 bp, synthetic construct
  source 1..50: mol_type = other DNA
taaaagaatccttcaaaatctagttttttagcttttcaaccgaacattta

SEQ ID NO: 52972 - DNA, 50 bp, synthetic construct
  source 1..50: mol_type = other DNA
tgttgtttctgtactagatctaaatcattatctgttttatagaggtcacc

SEQ ID NO: 52973 - DNA, 50 bp, synthetic construct
  source 1..50: mol_type = other DNA
ggaggcctgccgctccgtccaccacgttcaagccggcggaggtggtgaag

SEQ ID NO: 52974 - DNA, 50 bp, synthetic construct
  source 1..50: mol_type = other DNA
taaaaggtcatcctgtgcgcagggaagtctgcgcggtatttgatcttgcc

SEQ ID NO: 52975 - DNA, 50 bp, synthetic construct
  source 1..50: mol_type = other DNA
cggcaggcgataaagatggctataggtccagcctgtttatcgggctgctg

SEQ ID NO: 52976 - DNA, 50 bp, synthetic construct
  source 1..50: mol_type = other DNA
ctcgcgggcgtcatgcggaacggtatatacagcaccatgaaagcagcgat

SEQ ID NO: 52977 - DNA, 50 bp, synthetic construct
  source 1..50: mol_type = other DNA
gccggatagttccggcgcctgctgcagggcagggcgcggtggtatgggcg

SEQ ID NO: 52978 - DNA, 50 bp, synthetic construct
  source 1..50: mol_type = other DNA
ataaggtttgggtagaatctgtccttacccagatttgataaaaaataaaa

SEQ ID NO: 52979 - DNA, 50 bp, synthetic construct
  source 1..50: mol_type = other DNA
tgcttcaacacaaccaagatcaagtagtggaaactgcctgttatgaaaac

SEQ ID NO: 52980 - DNA, 50 bp, synthetic construct
  source 1..50: mol_type = other DNA
gcgccggtgatatggcgcgcgatcgcgatcgtcgcgacgatctccggcct

SEQ ID NO: 52981 - DNA, 50 bp, synthetic construct
  source 1..50: mol_type = other DNA
acgacattgggcaggcggcaagagtgttcctgccgtgggatgaagttctc

SEQ ID NO: 52982 - DNA, 50 bp, synthetic construct
  source 1..50: mol_type = other DNA
aagtgaggtattccatgaaacaattatttgttatgcctattgtatcaaat

SEQ ID NO: 52983 - DNA, 50 bp, synthetic construct
  source 1..50: mol_type = other DNA
atttatactgtcatttatttatggtatgttcaatataaaaattatggaat

SEQ ID NO: 52984 - DNA, 50 bp, synthetic construct
  source 1..50: mol_type = other DNA
attttgtttattttgaaaaagaactatgtatttctcaaagaataccttta

SEQ ID NO: 52985 - DNA, 50 bp, synthetic construct
  source 1..50: mol_type = other DNA
cccgccgaagatcacggtgtcggtgccgtcacaccgtccgcgtcggcagg

SEQ ID NO: 52986 - DNA, 50 bp, synthetic construct
  source 1..50: mol_type = other DNA
agaataatatgtttgttcatataaatgaaaatgcagaaaattagtattca

SEQ ID NO: 52987 - DNA, 50 bp, synthetic construct
  source 1..50: mol_type = other DNA
ttaggcaactttaccccttcgcaaattttaaaagagataaagacgaattt

SEQ ID NO: 52988 - DNA, 50 bp, synthetic construct
  source 1..50: mol_type = other DNA
ataattttttggtgcacctatattaaaaaataggaacccaaaaaaaatag

SEQ ID NO: 52989 - DNA, 50 bp, synthetic construct
  source 1..50: mol_type = other DNA
aaatatcgcaatcgaccgtcaatctataataattatgtattgctaaatat

SEQ ID NO: 52990 - DNA, 50 bp, synthetic construct
  source 1..50: mol_type = other DNA
ataaaactctaaccttaaaccaacatatttggataatccaaaagttttat

SEQ ID NO: 52991 - DNA, 50 bp, synthetic construct
  source 1..50: mol_type = other DNA
atggcgcaacgcgcaggacgcccccggtatggtctggagtttagcaaaat

SEQ ID NO: 52992 - DNA, 50 bp, synthetic construct
  source 1..50: mol_type = other DNA
tgtatcacgtacatcaaagttgtttgaatgactttaatattatacaaaca

SEQ ID NO: 52993 - DNA, 50 bp, synthetic construct
  source 1..50: mol_type = other DNA
tgaagcggaagaggattttgattcaacgatcaaaaaaagaggttttttca

SEQ ID NO: 52994 - DNA, 50 bp, synthetic construct
  source 1..50: mol_type = other DNA
gcacgcaccatcctctgccgccatttcggccgggagacgcggttgcggct

SEQ ID NO: 52995 - DNA, 50 bp, synthetic construct
  source 1..50: mol_type = other DNA
gcttcacctatttacatgacagagaagcctctgatccagatcgatgaagc

SEQ ID NO: 52996 - DNA, 50 bp, synthetic construct
  source 1..50: mol_type = other DNA
taattcagactgctcaaaaatataaaaacaaaaattctcattcagacgta

SEQ ID NO: 52997 - DNA, 50 bp, synthetic construct
  source 1..50: mol_type = other DNA
ttcttcatcatcaacaatcatcattttgtgatttttttcacttgtaagaa

SEQ ID NO: 52998 - DNA, 50 bp, synthetic construct
  source 1..50: mol_type = other DNA
ggatcagcaccaatgtaccggcccatggcccgaagattcgccaaattctc

SEQ ID NO: 52999 - DNA, 50 bp, synthetic construct
  source 1..50: mol_type = other DNA
acgcgccgggaaggtaacatgcgcataacagccaagccttcccggcaagt

SEQ ID NO: 53000 - DNA, 50 bp, synthetic construct
  source 1..50: mol_type = other DNA
cagatgaacttctttaccggcgtggcaacgccagagcctgagttcattct

SEQ ID NO: 53001 - DNA, 50 bp, synthetic construct
  source 1..50: mol_type = other DNA
cgctcgacagcacgcagaaaaacgcgagaagcttaaaccgctggctgggc

SEQ ID NO: 53002 - DNA, 50 bp, synthetic construct
  source 1..50: mol_type = other DNA
ttcatacatacctcacgtatttaattggtctggatcaagctatttatgag

SEQ ID NO: 53003 - DNA, 50 bp, synthetic construct
  source 1..50: mol_type = other DNA
caggcggctttcttgccaatgaggatcatcaatgccggcatcaccgtcgt

SEQ ID NO: 53004 - DNA, 50 bp, synthetic construct
  source 1..50: mol_type = other DNA
tcatgtaggttaaattaaagtctgaagtaaggttatggctcactacatgc

SEQ ID NO: 53005 - DNA, 50 bp, synthetic construct
  source 1..50: mol_type = other DNA
tcaaaacggcgggcaacaaaaaagccattgaagccagcgcaccgagccct

SEQ ID NO: 53006 - DNA, 50 bp, synthetic construct
  source 1..50: mol_type = other DNA
gttgctgtcttcggtgcccatgacggctcatcaaagcgaaagacggtcgg

SEQ ID NO: 53007 - DNA, 50 bp, synthetic construct
  source 1..50: mol_type = other DNA
aaattcgattagataaccgtcatatttatcggggatattgtcggtaaggt

SEQ ID NO: 53008 - DNA, 50 bp, synthetic construct
  source 1..50: mol_type = other DNA
agattgggcattttaagctgtgtattcatacagttgcaaattgccttctt

SEQ ID NO: 53009 - DNA, 50 bp, synthetic construct
  source 1..50: mol_type = other DNA
agcccttcactgtcggcaaggatatgtatcctcccgcttcaaagagggca

SEQ ID NO: 53010 - DNA, 50 bp, synthetic construct
  source 1..50: mol_type = other DNA
aagggtctaaaaaaaaatagatttttaaatttaatatctatgagacccta

SEQ ID NO: 53011 - DNA, 50 bp, synthetic construct
  source 1..50: mol_type = other DNA
cctagctgctttcttatacaacatagtttagggattagaaagagggattt

SEQ ID NO: 53012 - DNA, 50 bp, synthetic construct
  source 1..50: mol_type = other DNA
cacattaactatagatgagaaaaaggagcgcctatgtcatatctcatgta

SEQ ID NO: 53013 - DNA, 50 bp, synthetic construct
  source 1..50: mol_type = other DNA
tatatgctatataaaccgttgttattatacggcggtttttattgccgccg

SEQ ID NO: 53014 - DNA, 50 bp, synthetic construct
  source 1..50: mol_type = other DNA
cggtgttcataacatccccctttttaaaaaggcaaccgttatggagggcg

SEQ ID NO: 53015 - DNA, 50 bp, synthetic construct
  source 1..50: mol_type = other DNA
cagctgcaccatataggtacaactgcgatcgtatctcatggacacaatcg

SEQ ID NO: 53016 - DNA, 50 bp, synthetic construct
  source 1..50: mol_type = other DNA
tgataagaacaaataaaagaaagatatcagagattttttgtaactttgcc

SEQ ID NO: 53017 - DNA, 50 bp, synthetic construct
  source 1..50: mol_type = other DNA
caaaaagtccccctagtaggtgtaaggtcaaccttatgggtgacttgttt

SEQ ID NO: 53018 - DNA, 50 bp, synthetic construct
  source 1..50: mol_type = other DNA
tttagaaaatttaaatttgattatcaccattacggtggtaattttctaaa

SEQ ID NO: 53019 - DNA, 50 bp, synthetic construct
  source 1..50: mol_type = other DNA
aaaagaatcttgaattagaaaacaaagcgactttgtttcaacactctttt

SEQ ID NO: 53020 - DNA, 50 bp, synthetic construct
  source 1..50: mol_type = other DNA
acaggcttgcatctcccggtagtggcgggaactacatcatgcagagcaaa

SEQ ID NO: 53021 - DNA, 50 bp, synthetic construct
  source 1..50: mol_type = other DNA
taaaatggcaatcaaaactttactcaagtaacctgaaaataactctttta

SEQ ID NO: 53022 - DNA, 50 bp, synthetic construct
  source 1..50: mol_type = other DNA
tagtacaaaagatttttatggattacagctcttaaaaatcttatgataaa

SEQ ID NO: 53023 - DNA, 50 bp, synthetic construct
  source 1..50: mol_type = other DNA
atagtcaagaaggtaatctgttatataataatgtttatattctgtaaaat

SEQ ID NO: 53024 - DNA, 50 bp, synthetic construct
  source 1..50: mol_type = other DNA
tagctatttgataccactataagtggttgaacagggggctatgatagtta

SEQ ID NO: 53025 - DNA, 50 bp, synthetic construct
  source 1..50: mol_type = other DNA
catgtacgctgatgagcggcgtagcggcaacgtgcatatcatcagccatc

SEQ ID NO: 53026 - DNA, 50 bp, synthetic construct
  source 1..50: mol_type = other DNA
acataaaatctgtttctaaaattaaacttagttatgaaccttttttattg

SEQ ID NO: 53027 - DNA, 50 bp, synthetic construct
  source 1..50: mol_type = other DNA
aattggtagtggtggttttgcaaatatgggcaaaaacattacagttattc

SEQ ID NO: 53028 - DNA, 50 bp, synthetic construct
  source 1..50: mol_type = other DNA
gccgccctggtcctcgccgcgtgcggggggacggccatgacccgcgtcgc

SEQ ID NO: 53029 - DNA, 50 bp, synthetic construct
  source 1..50: mol_type = other DNA
catcttttttcgcttttttcttccttatggtaaaatatataaaaaagatg

SEQ ID NO: 53030 - DNA, 50 bp, synthetic construct
  source 1..50: mol_type = other DNA
gccagggcccgcaaaggagcacctgatggaattcgaccaagggattgtca

SEQ ID NO: 53031 - DNA, 50 bp, synthetic construct
  source 1..50: mol_type = other DNA
caaaactactccctccatattactaagaaaccctgtagatacgatagttg

SEQ ID NO: 53032 - DNA, 50 bp, synthetic construct
  source 1..50: mol_type = other DNA
aaaacacccttttccagaaaaaaacttttttttatgcgaattgctactta

SEQ ID NO: 53033 - DNA, 50 bp, synthetic construct
  source 1..50: mol_type = other DNA
aagtatggagatcaaaagagcctcataagactgctttgttttccatacaa

SEQ ID NO: 53034 - DNA, 50 bp, synthetic construct
  source 1..50: mol_type = other DNA
gtgatataaatgagccacacaccattatctgtgacggctgtcgttataac

SEQ ID NO: 53035 - DNA, 50 bp, synthetic construct
  source 1..50: mol_type = other DNA
ttcggttttgcccattctcccataaaaatgactgaagcaaaaatgagtgt

SEQ ID NO: 53036 - DNA, 50 bp, synthetic construct
  source 1..50: mol_type = other DNA
ttagatatattagaacaacaacaaatatgttattatgataatatatataa

SEQ ID NO: 53037 - DNA, 50 bp, synthetic construct
  source 1..50: mol_type = other DNA
cagtacaaaagatttttaaggattacagctcttaaaaatcttatgataaa

SEQ ID NO: 53038 - DNA, 50 bp, synthetic construct
  source 1..50: mol_type = other DNA
tacttcaaaaatatactaaatctacgtaaaagcaatatacggttggaact

SEQ ID NO: 53039 - DNA, 50 bp, synthetic construct
  source 1..50: mol_type = other DNA
aagtcgcttaacgtaatagcataatattatgctatttttcgcaacctgca

SEQ ID NO: 53040 - DNA, 50 bp, synthetic construct
  source 1..50: mol_type = other DNA
ctatttctataaatgatacagaaacaacttaatatcttaaataaaatttt

SEQ ID NO: 53041 - DNA, 50 bp, synthetic construct
  source 1..50: mol_type = other DNA
taataaagagttttcagaagaggaattttgaatatgtgaagtctttattt

SEQ ID NO: 53042 - DNA, 50 bp, synthetic construct
  source 1..50: mol_type = other DNA
taaaagctattaatagcaagctttttccttgttgatatcggtactgtagc

SEQ ID NO: 53043 - DNA, 50 bp, synthetic construct
  source 1..50: mol_type = other DNA
ccgatgaagatcgtttttttctgaattcaacttgcaacgagtagcaattt

SEQ ID NO: 53044 - DNA, 50 bp, synthetic construct
  source 1..50: mol_type = other DNA
catgtttctataaagtattttaaattttttatttatttcatactctcttt

SEQ ID NO: 53045 - DNA, 50 bp, synthetic construct
  source 1..50: mol_type = other DNA
tcagggaggaactgcagttttttctttaaattaaaggcgtattgttcttg

SEQ ID NO: 53046 - DNA, 50 bp, synthetic construct
  source 1..50: mol_type = other DNA
tttacaaacatggttcagctgttataatggaggagaagattgatggaaaa

SEQ ID NO: 53047 - DNA, 50 bp, synthetic construct
  source 1..50: mol_type = other DNA
tattatagcgcgccgtatcggaaaaatgaccgatacggacattgataatc

SEQ ID NO: 53048 - DNA, 50 bp, synthetic construct
  source 1..50: mol_type = other DNA
tttccgcactgatttatcagcttacggaaccggagtctgaccgacggaaa

SEQ ID NO: 53049 - DNA, 50 bp, synthetic construct
  source 1..50: mol_type = other DNA
tcatgcccgctcgttcgagcgggctttccagcagccaccagaaatccgga

SEQ ID NO: 53050 - DNA, 50 bp, synthetic construct
  source 1..50: mol_type = other DNA
atgcatgaaaaaagccttcccaactgcatgggaaggcttttctgttgcct

SEQ ID NO: 53051 - DNA, 50 bp, synthetic construct
  source 1..50: mol_type = other DNA
agatggaaaatatacataatctgcttttaatttatgtaataatacaaatc

SEQ ID NO: 53052 - DNA, 50 bp, synthetic construct
  source 1..50: mol_type = other DNA
cttccacgatataataaaattcttattgctgcttcattatgacaacacaa

SEQ ID NO: 53053 - DNA, 50 bp, synthetic construct
  source 1..50: mol_type = other DNA
attacccgtttgatttcgcttttttccccggcttaattcatcccgttcag

SEQ ID NO: 53054 - DNA, 50 bp, synthetic construct
  source 1..50: mol_type = other DNA
catcactctttagcccctgtaagtcaagggtcagggactaaggggtgagc

SEQ ID NO: 53055 - DNA, 50 bp, synthetic construct
  source 1..50: mol_type = other DNA
tttgcttccggcgctatgccgcacgttgtccatccctttccgccaaaaaa

SEQ ID NO: 53056 - DNA, 50 bp, synthetic construct
  source 1..50: mol_type = other DNA
aatgatattttagcttggttattgtgagaagaccattttaaattttcatt

SEQ ID NO: 53057 - DNA, 50 bp, synthetic construct
  source 1..50: mol_type = other DNA
ctttctcattttttattcctaaaccaagcttggttgaaaaaagccccatt

SEQ ID NO: 53058 - DNA, 50 bp, synthetic construct
  source 1..50: mol_type = other DNA
aaagaatgtaatgaaaaaatcgtgttcggctttttttcattcctctgttt

SEQ ID NO: 53059 - DNA, 50 bp, synthetic construct
  source 1..50: mol_type = other DNA
agccgggtcatcggcggttgcttcaaggtgtgtgggtcgatgttcgtcag

SEQ ID NO: 53060 - DNA, 50 bp, synthetic construct
  source 1..50: mol_type = other DNA
taaaagaccgggcatccttcatagcggtctgaatgatgatggggaggttt

SEQ ID NO: 53061 - DNA, 50 bp, synthetic construct
  source 1..50: mol_type = other DNA
aagccttacctccttccgttttggtaataaaaccgatggaggtatctctg

SEQ ID NO: 53062 - DNA, 50 bp, synthetic construct
  source 1..50: mol_type = other DNA
ttgttttgggtgaaatttaaactgtacagtttaaactccacctaaaaata

SEQ ID NO: 53063 - DNA, 50 bp, synthetic construct
  source 1..50: mol_type = other DNA
tcgttaaccagaaaggcggtgtcgggcagacacgcaagatttaggttctt

SEQ ID NO: 53064 - DNA, 50 bp, synthetic construct
  source 1..50: mol_type = other DNA
cccgcattgaaagttcaagaaataattgttttttgattttcactaagaaa

SEQ ID NO: 53065 - DNA, 50 bp, synthetic construct
  source 1..50: mol_type = other DNA
gtcgagagcgcggtgatccgcgtcgagaaagagagtcccatgccttcgat

SEQ ID NO: 53066 - DNA, 50 bp, synthetic construct
  source 1..50: mol_type = other DNA
gttccatttcgttgactgcattgcgtgcgacgaagttaacatctcgccct

SEQ ID NO: 53067 - DNA, 50 bp, synthetic construct
  source 1..50: mol_type = other DNA
gatggcctcctcttcggtgatgattcaaactcaccgaatccagaatcctc

SEQ ID NO: 53068 - DNA, 50 bp, synthetic construct
  source 1..50: mol_type = other DNA
ccagccagcatgggagagaaagattcgcctttggaatccatggtgttgat

SEQ ID NO: 53069 - DNA, 50 bp, synthetic construct
  source 1..50: mol_type = other DNA
aagtaaaaagaagctaaatcaccttggtaaaattttgcttctttttatct

SEQ ID NO: 53070 - DNA, 50 bp, synthetic construct
  source 1..50: mol_type = other DNA
ggtcacctgatggctgataaatatacatatttatcttcattcatttgcca

SEQ ID NO: 53071 - DNA, 50 bp, synthetic construct
  source 1..50: mol_type = other DNA
gaatttagaattagagactacattttatttgaatcaatgactttaatttc

SEQ ID NO: 53072 - DNA, 50 bp, synthetic construct
  source 1..50: mol_type = other DNA
atggtattgataccattgaagaatataatgttgaattgtataaataataa

SEQ ID NO: 53073 - DNA, 50 bp, synthetic construct
  source 1..50: mol_type = other DNA
tttttattatgcatagaggaagtgttaactcgtccctaacatgtaaaaaa

SEQ ID NO: 53074 - DNA, 50 bp, synthetic construct
  source 1..50: mol_type = other DNA
ctacttgagaaaatagttgtgggtgattctggtgaaaatttccaaagtat

SEQ ID NO: 53075 - DNA, 50 bp, synthetic construct
  source 1..50: mol_type = other DNA
atacaaggaagtacaggaaggttctgtaaccttggatgatttcgatgtaa

SEQ ID NO: 53076 - DNA, 50 bp, synthetic construct
  source 1..50: mol_type = other DNA
tgtgttattctataaattgatataaataatacagtttatcaagaccgatt

SEQ ID NO: 53077 - DNA, 50 bp, synthetic construct
  source 1..50: mol_type = other DNA
aaaaaaacgagcgagaaaaaacaattcatatagttttacctcttttcttt

SEQ ID NO: 53078 - DNA, 50 bp, synthetic construct
  source 1..50: mol_type = other DNA
atattaaaattccttgttgcattttatatggcaacctcccattttatatc

SEQ ID NO: 53079 - DNA, 50 bp, synthetic construct
  source 1..50: mol_type = other DNA
atcggggaagtaaattggaatggtattttattcaattttcctgtttataa

SEQ ID NO: 53080 - DNA, 50 bp, synthetic construct
  source 1..50: mol_type = other DNA
acacattggaagaatacaagcaaaattttcggggtgccctggaaaggggc

SEQ ID NO: 53081 - DNA, 50 bp, synthetic construct
  source 1..50: mol_type = other DNA
gcactatcccaagaactgccattaaaaaggagcaaagcatgagatatttt

SEQ ID NO: 53082 - DNA, 50 bp, synthetic construct
  source 1..50: mol_type = other DNA
atttgcggaacgagtaagtatctattattccagcacctcgtctaccagct

SEQ ID NO: 53083 - DNA, 50 bp, synthetic construct
  source 1..50: mol_type = other DNA
gtttttatctctctcagttctattcacaaacccttaagagagatattcaa

SEQ ID NO: 53084 - DNA, 50 bp, synthetic construct
  source 1..50: mol_type = other DNA
aaggtatattgttaaaaatccactattttatgtgttccccaaaatatctt

SEQ ID NO: 53085 - DNA, 50 bp, synthetic construct
  source 1..50: mol_type = other DNA
atcacaaagataccagcgtctatcacgataaccgaccggcgctatctcgg

SEQ ID NO: 53086 - DNA, 50 bp, synthetic construct
  source 1..50: mol_type = other DNA
tccgggcgttccgttattgtcgtgggcacggcaacgacaaagtggaagga

SEQ ID NO: 53087 - DNA, 50 bp, synthetic construct
  source 1..50: mol_type = other DNA
caactaaagcttctcgtactacatttgtgtagtctttcagtctccagttt

SEQ ID NO: 53088 - DNA, 50 bp, synthetic construct
  source 1..50: mol_type = other DNA
tcagcatacgcgctgacaatggcagctatctccttgaagcaggcagcaga

SEQ ID NO: 53089 - DNA, 50 bp, synthetic construct
  source 1..50: mol_type = other DNA
catcactcaaaacatgagtattatcaataaacatcttgcattgtgcattg

SEQ ID NO: 53090 - DNA, 50 bp, synthetic construct
  source 1..50: mol_type = other DNA
aaaaagcagaagcacaaataaggaatttgtttttttgcattgtgtgttaa

SEQ ID NO: 53091 - DNA, 50 bp, synthetic construct
  source 1..50: mol_type = other DNA
ttaagaaaatatatactatattggagtggtcataatgattgttttccccg

SEQ ID NO: 53092 - DNA, 50 bp, synthetic construct
  source 1..50: mol_type = other DNA
ccctttttagttttaagcaattttgcggggttaatgatctgtaaaaaggc

SEQ ID NO: 53093 - DNA, 50 bp, synthetic construct
  source 1..50: mol_type = other DNA
atcggctctcaaaacctctaccaagaatcagaacggcagacagagccttt

SEQ ID NO: 53094 - DNA, 50 bp, synthetic construct
  source 1..50: mol_type = other DNA
ccttgcaccgaactccttgaactctacaggacaaggtgtttggtgaaaga

SEQ ID NO: 53095 - DNA, 50 bp, synthetic construct
  source 1..50: mol_type = other DNA
cgatcagctcagaccaaagcggaaggatgtgctcaccggcgagatgagaa

SEQ ID NO: 53096 - DNA, 50 bp, synthetic construct
  source 1..50: mol_type = other DNA
aatatttgcattcaaaaaaccttacaaaagatggcaggaatgcaagagag

SEQ ID NO: 53097 - DNA, 50 bp, synthetic construct
  source 1..50: mol_type = other DNA
cgtttccgcccgaagatgggaaaaatcaggccttccttcgaggcgaacca

SEQ ID NO: 53098 - DNA, 50 bp, synthetic construct
  source 1..50: mol_type = other DNA
atccagctgcggcggtagctgggcgcggtgagctacgcgatcatgtcgac

SEQ ID NO: 53099 - DNA, 50 bp, synthetic construct
  source 1..50: mol_type = other DNA
aatactttaaagatttttttgtgaatacattaaagaatctttaaactcgt

SEQ ID NO: 53100 - DNA, 50 bp, synthetic construct
  source 1..50: mol_type = other DNA
cataaatgaccagaaattttccacatgacaaaatgaggtgtcataacatg

SEQ ID NO: 53101 - DNA, 50 bp, synthetic construct
  source 1..50: mol_type = other DNA
atcaaaaataaatgatagctattaaagaatatgaaaggggtaacttaaga

SEQ ID NO: 53102 - DNA, 50 bp, synthetic construct
  source 1..50: mol_type = other DNA
ttagtaagatgtaagggataaaaaattttacatctattatatcaaaaaaa

SEQ ID NO: 53103 - DNA, 50 bp, synthetic construct
  source 1..50: mol_type = other DNA
tccttggcctgccaccttgccaatgccgagacccgggcgctcgccgagga

SEQ ID NO: 53104 - DNA, 50 bp, synthetic construct
  source 1..50: mol_type = other DNA
tgcccggatggctaataatatgcacgtgcatcatagccgccatacaacgg

SEQ ID NO: 53105 - DNA, 50 bp, synthetic construct
  source 1..50: mol_type = other DNA
aatagctgaaacacaggtcttgagaggagcagacatatgtttgctctttt

SEQ ID NO: 53106 - DNA, 50 bp, synthetic construct
  source 1..50: mol_type = other DNA
attaacagaaaatttcttcaaagtaccttttgaagaatcgttctgtaatt

SEQ ID NO: 53107 - DNA, 50 bp, synthetic construct
  source 1..50: mol_type = other DNA
acaaacctcaaagaagagtataaaaaaacattctctccttctttagctga

SEQ ID NO: 53108 - DNA, 50 bp, synthetic construct
  source 1..50: mol_type = other DNA
gacggcagattttctcgtgaaaataaaggttcaggaggaatatgcaaatc

SEQ ID NO: 53109 - DNA, 50 bp, synthetic construct
  source 1..50: mol_type = other DNA
cttcaggttgcatgtgatctgtaattttacaggttcttatctaactgata

SEQ ID NO: 53110 - DNA, 50 bp, synthetic construct
  source 1..50: mol_type = other DNA
atctggatcgtcaacgcctaccagatttgatatgtgtgtacgagtctcac

SEQ ID NO: 53111 - DNA, 50 bp, synthetic construct
  source 1..50: mol_type = other DNA
tattaattccattttcttgtctggatgtaacaaataaaattctgtactgt

SEQ ID NO: 53112 - DNA, 50 bp, synthetic construct
  source 1..50: mol_type = other DNA
cgtcaagcagccgttttttctggatcatttattgtaagcggtgtttgaaa

SEQ ID NO: 53113 - DNA, 50 bp, synthetic construct
  source 1..50: mol_type = other DNA
gtagaaacctaaaatatcatcacttaaaaaaactaaaatttttttgagaa

SEQ ID NO: 53114 - DNA, 50 bp, synthetic construct
  source 1..50: mol_type = other DNA
ttcattgtttactcctttaaaatatttagttttaataagtaaactaggag

SEQ ID NO: 53115 - DNA, 50 bp, synthetic construct
  source 1..50: mol_type = other DNA
atgggtaaaagcggttacagcgaagattgcgtgtcagctgatatacgatt

SEQ ID NO: 53116 - DNA, 50 bp, synthetic construct
  source 1..50: mol_type = other DNA
gttcgttgagttcttcaacgacgctggtgtcttcgatcagcttgttgacc

SEQ ID NO: 53117 - DNA, 50 bp, synthetic construct
  source 1..50: mol_type = other DNA
aggagtgattctcggctttttatttttatataaagggaggaatcatcaac

SEQ ID NO: 53118 - DNA, 50 bp, synthetic construct
  source 1..50: mol_type = other DNA
cttagttgattatgacggtacaaatttatcggacataatgagttcctcaa

SEQ ID NO: 53119 - DNA, 50 bp, synthetic construct
  source 1..50: mol_type = other DNA
ggcgccgtatcgcgccggacatcacctgatgtcaggagcgaatgatcgcc

SEQ ID NO: 53120 - DNA, 50 bp, synthetic construct
  source 1..50: mol_type = other DNA
ctttcatatagtatattaatcatggatagcctgcatctactaattgctgt

SEQ ID NO: 53121 - DNA, 50 bp, synthetic construct
  source 1..50: mol_type = other DNA
gcaatagccgtgagggtcttatatgttaataagacagcggctacctttga

SEQ ID NO: 53122 - DNA, 50 bp, synthetic construct
  source 1..50: mol_type = other DNA
tttatcacagaaagttttagaatttaaatttttgtattttatgtgggaaa

SEQ ID NO: 53123 - DNA, 50 bp, synthetic construct
  source 1..50: mol_type = other DNA
tagcagcttatactaaaaactaattcgtgtatttttaaatacctgaatgt

SEQ ID NO: 53124 - DNA, 50 bp, synthetic construct
  source 1..50: mol_type = other DNA
ttaataacaggaaagacatccatcattttggttgtttttattgtttttgt

SEQ ID NO: 53125 - DNA, 50 bp, synthetic construct
  source 1..50: mol_type = other DNA
tccgggcaaacggaaccgggctcccgggagcaaatggaacgggttcctct

SEQ ID NO: 53126 - DNA, 50 bp, synthetic construct
  source 1..50: mol_type = other DNA
ccgattctatcaatcttgaaatttataaaggagaggttttttcgataaca

SEQ ID NO: 53127 - DNA, 50 bp, synthetic construct
  source 1..50: mol_type = other DNA
taaaagagaagtttcgtgatgacaataagccactgctaacgaatcttttc

SEQ ID NO: 53128 - DNA, 50 bp, synthetic construct
  source 1..50: mol_type = other DNA
ttgcgtcctcgcacatcctgcaaaaaagccccgcatttgcgaggctaatt

SEQ ID NO: 53129 - DNA, 50 bp, synthetic construct
  source 1..50: mol_type = other DNA
taaaggtagctttatagcaaaggattaactttcatataggttgacttcta

SEQ ID NO: 53130 - DNA, 50 bp, synthetic construct
  source 1..50: mol_type = other DNA
ttattataaaatagagaaaatataaatatctataaatgattccggaatgg

SEQ ID NO: 53131 - DNA, 50 bp, synthetic construct
  source 1..50: mol_type = other DNA
ataaccgtcttgcgtcatgttgaaaagaagtaacccagcaagaaccaatc

SEQ ID NO: 53132 - DNA, 50 bp, synthetic construct
  source 1..50: mol_type = other DNA
acggcaagctcggcgcgccgatcagccatgacccgcgtcgccctttacgc

SEQ ID NO: 53133 - DNA, 50 bp, synthetic construct
  source 1..50: mol_type = other DNA
aagaagaaaataataaataaaatcatgatttagtcagcgatttttttcgc

SEQ ID NO: 53134 - DNA, 50 bp, synthetic construct
  source 1..50: mol_type = other DNA
tacgggtagcagggcgtaaaaatgcccctttttgggggctgtcgctcgtc

SEQ ID NO: 53135 - DNA, 50 bp, synthetic construct
  source 1..50: mol_type = other DNA
cttttcaaccggacatacgggcacgcctgccggtacatctccttatagct

SEQ ID NO: 53136 - DNA, 50 bp, synthetic construct
  source 1..50: mol_type = other DNA
tttgtcagcgccccttctgaagtttttgctgtgccggggaacgccgtaga

SEQ ID NO: 53137 - DNA, 50 bp, synthetic construct
  source 1..50: mol_type = other DNA
ctgtaaacgggcaaactttttattgcaaagggaaaacagccattttacat

SEQ ID NO: 53138 - DNA, 50 bp, synthetic construct
  source 1..50: mol_type = other DNA
ataacagcgttcataaaaccaccaaaggcaggtgaaatgtaatggcatat

SEQ ID NO: 53139 - DNA, 50 bp, synthetic construct
  source 1..50: mol_type = other DNA
cttgtctgtctcattttcgcctttttaagtgcaaaaaagaatgaaccaag

SEQ ID NO: 53140 - DNA, 50 bp, synthetic construct
  source 1..50: mol_type = other DNA
ttaaagtggaggactagcgcatggcaatattatcaatatgagcactttag

SEQ ID NO: 53141 - DNA, 50 bp, synthetic construct
  source 1..50: mol_type = other DNA
atatttagcaatacataattattatagattgacggtcgattgcgatattt

SEQ ID NO: 53142 - DNA, 50 bp, synthetic construct
  source 1..50: mol_type = other DNA
cgtatcttttagatcatatattatatgtaaattatatcataaaaactact

SEQ ID NO: 53143 - DNA, 50 bp, synthetic construct
  source 1..50: mol_type = other DNA
cgggatcggtcttcccatatatactcttctctgcggaaaacggaatcccg

SEQ ID NO: 53144 - DNA, 50 bp, synthetic construct
  source 1..50: mol_type = other DNA
agcggcagtggatgcttgtgctggtcgcaatcgcttgatgcgctgatgtt

SEQ ID NO: 53145 - DNA, 50 bp, synthetic construct
  source 1..50: mol_type = other DNA
gtaaagatccaggagcacacccttttggaggtatggctatgaataggagt

SEQ ID NO: 53146 - DNA, 50 bp, synthetic construct
  source 1..50: mol_type = other DNA
ataatgcaccaacctttgcataaatttttcgcaaaaaggcggcgatctcg

SEQ ID NO: 53147 - DNA, 50 bp, synthetic construct
  source 1..50: mol_type = other DNA
ttgttccaaataattattcaataatatcgtcataaatcaatgcatgacag

SEQ ID NO: 53148 - DNA, 50 bp, synthetic construct
  source 1..50: mol_type = other DNA
gaactaatcaattggaaaagcaaaatattgggctttaacttgattagttc

SEQ ID NO: 53149 - DNA, 50 bp, synthetic construct
  source 1..50: mol_type = other DNA
tcgctttacagagacaacttcatgatcttgagattgttcatcgcaatcgc

SEQ ID NO: 53150 - DNA, 50 bp, synthetic construct
  source 1..50: mol_type = other DNA
ttatgatgagttatgaagagattgaaagatgagatttgtaacgggggtat

SEQ ID NO: 53151 - DNA, 50 bp, synthetic construct
  source 1..50: mol_type = other DNA
acaatactaatgccgtcaaattctattttatttgcataattttgcattgc

SEQ ID NO: 53152 - DNA, 50 bp, synthetic construct
  source 1..50: mol_type = other DNA
atcataggtggtggaaaaagaaaagcttttctttgagatagacggcacgc

SEQ ID NO: 53153 - DNA, 50 bp, synthetic construct
  source 1..50: mol_type = other DNA
ctataggcatggcagacagtgttgtccatcaccaagccccaatcctaaaa

SEQ ID NO: 53154 - DNA, 50 bp, synthetic construct
  source 1..50: mol_type = other DNA
tgggatgcagaagatttagttcaagacgcattaaaccgccaaacattcta

SEQ ID NO: 53155 - DNA, 50 bp, synthetic construct
  source 1..50: mol_type = other DNA
tatttgagtatcaaattgactgaaaaatcgggcgcattgatacttggaaa

SEQ ID NO: 53156 - DNA, 50 bp, synthetic construct
  source 1..50: mol_type = other DNA
ggactacggccgggcggcgccgggcgcccgtcggtgattcgccttgatga

SEQ ID NO: 53157 - DNA, 50 bp, synthetic construct
  source 1..50: mol_type = other DNA
aagtgtcacatacgaaatagctgctcgcaaccttttcatatatgacacaa

SEQ ID NO: 53158 - DNA, 50 bp, synthetic construct
  source 1..50: mol_type = other DNA
tgttaatatattattgttatttttataaaactacaatcaatgtataaaca

SEQ ID NO: 53159 - DNA, 50 bp, synthetic construct
  source 1..50: mol_type = other DNA
ctttgtaggcattatctttttttaattacaaatgatgaatttgtggaaat

SEQ ID NO: 53160 - DNA, 50 bp, synthetic construct
  source 1..50: mol_type = other DNA
ttgatttctgcggctttcaatggtatccctaaagaagccgcatctctgat

SEQ ID NO: 53161 - DNA, 50 bp, synthetic construct
  source 1..50: mol_type = other DNA
ggcaagataaatcataaaattgctttagcaggcttactgtactctttcac

SEQ ID NO: 53162 - DNA, 50 bp, synthetic construct
  source 1..50: mol_type = other DNA
cacaggaaccaacagataatacccttgggtaagcaagggctgtccctttt

SEQ ID NO: 53163 - DNA, 50 bp, synthetic construct
  source 1..50: mol_type = other DNA
agaccgccttcgcggtcgcgaacggccaagggcgagtgcgtcggcattct

SEQ ID NO: 53164 - DNA, 50 bp, synthetic construct
  source 1..50: mol_type = other DNA
ccaacatatacaggaaaagtgctatatatatgctcattctcccattttga

SEQ ID NO: 53165 - DNA, 50 bp, synthetic construct
  source 1..50: mol_type = other DNA
gatgcacgagctctcctgctttgatgtaaaacaaggagctcttgtggtaa

SEQ ID NO: 53166 - DNA, 50 bp, synthetic construct
  source 1..50: mol_type = other DNA
tccttgtggatgtcactagtttacatctgaacatttgtaatccacaaggc

SEQ ID NO: 53167 - DNA, 50 bp, synthetic construct
  source 1..50: mol_type = other DNA
ggtggcatccctgaacgagttgtctgcgcaagcacggcaagctggagacc

SEQ ID NO: 53168 - DNA, 50 bp, synthetic construct
  source 1..50: mol_type = other DNA
tgttatcctttcgggtcacactcatatggaagcttcccctttgcacggca

SEQ ID NO: 53169 - DNA, 50 bp, synthetic construct
  source 1..50: mol_type = other DNA
tggtgaaaaaaaatacgaatttagaattaaatcattatttttcataacca

SEQ ID NO: 53170 - DNA, 50 bp, synthetic construct
  source 1..50: mol_type = other DNA
tactcttgccagctgtgccaattcaaaggccgctgaaaacagcggtctta

SEQ ID NO: 53171 - DNA, 50 bp, synthetic construct
  source 1..50: mol_type = other DNA
aactccgcataaatgactgccgacataatgccagtaattgtaaaaaagcg

SEQ ID NO: 53172 - DNA, 50 bp, synthetic construct
  source 1..50: mol_type = other DNA
tttttttactgcttttgcgtgttcattttaaacttcaagcagtaaaaaag

SEQ ID NO: 53173 - DNA, 50 bp, synthetic construct
  source 1..50: mol_type = other DNA
ctgaggatgtgaggaaagcatcaaatttgatgattcagaagaataattga

SEQ ID NO: 53174 - DNA, 50 bp, synthetic construct
  source 1..50: mol_type = other DNA
catggttaaagaaccagtgttatcaaaataacggaggtaactaaaaatga

SEQ ID NO: 53175 - DNA, 50 bp, synthetic construct
  source 1..50: mol_type = other DNA
atttttgttaaacaggcaatgcctaccatcgatccctattccaccaaaat

SEQ ID NO: 53176 - DNA, 50 bp, synthetic construct
  source 1..50: mol_type = other DNA
gatggaaatctggacaacggcagtgagagaccgcgccgaaggtttccaaa

SEQ ID NO: 53177 - DNA, 50 bp, synthetic construct
  source 1..50: mol_type = other DNA
ctttcgacgggaacggagaaaacggattctcgatccgtcgccgaaaaagc

SEQ ID NO: 53178 - DNA, 50 bp, synthetic construct
  source 1..50: mol_type = other DNA
tataaacatatttactataccgaattcactcgattttgaacctggttata

SEQ ID NO: 53179 - DNA, 50 bp, synthetic construct
  source 1..50: mol_type = other DNA
agaaaagtaaccacgattccggctactgctgtgaagttgtttacatacat

SEQ ID NO: 53180 - DNA, 50 bp, synthetic construct
  source 1..50: mol_type = other DNA
tgattctactggattgtacttaaaatcgcgtaatcaccccagaacaacgt

SEQ ID NO: 53181 - DNA, 50 bp, synthetic construct
  source 1..50: mol_type = other DNA
catatgtcattataataacgtaatcgacatcaggctgacaatagctgatg

SEQ ID NO: 53182 - DNA, 50 bp, synthetic construct
  source 1..50: mol_type = other DNA
taaaagataaagataaaaagattaataacacttgatatatacatcattta

SEQ ID NO: 53183 - DNA, 50 bp, synthetic construct
  source 1..50: mol_type = other DNA
tgctttttttatgttataataggaaatgtgtttataaatggtttaaaaag

SEQ ID NO: 53184 - DNA, 50 bp, synthetic construct
  source 1..50: mol_type = other DNA
ttatattagttgttagttttcagtttataattgactaatctcatatatct

SEQ ID NO: 53185 - DNA, 50 bp, synthetic construct
  source 1..50: mol_type = other DNA
atttttttaaattaatatcatcctgttagaagataaagattaaaaaataa

SEQ ID NO: 53186 - DNA, 50 bp, synthetic construct
  source 1..50: mol_type = other DNA
tggaactaaatccaatttttactaattatgaaatattttgcttatgtaag

SEQ ID NO: 53187 - DNA, 50 bp, synthetic construct
  source 1..50: mol_type = other DNA
attggccaatgtgatttagggaagaaattgtctaatcagtagatttcaat

SEQ ID NO: 53188 - DNA, 50 bp, synthetic construct
  source 1..50: mol_type = other DNA
gaaaagctctataaaaaaacaaaaatttttattagaatatctttatttga

SEQ ID NO: 53189 - DNA, 50 bp, synthetic construct
  source 1..50: mol_type = other DNA
aaaaaaagtttttttgtttttcttacaagaaaaagaaaaaatcttacctt

SEQ ID NO: 53190 - DNA, 50 bp, synthetic construct
  source 1..50: mol_type = other DNA
gcgcatctgattacaaatttgtatatatacatttttgtaatcacattaga

SEQ ID NO: 53191 - DNA, 50 bp, synthetic construct
  source 1..50: mol_type = other DNA
gacttaaacgggcgtataatgcggtttggcggtatagccccgttcaaggg

SEQ ID NO: 53192 - DNA, 50 bp, synthetic construct
  source 1..50: mol_type = other DNA
gttcccgaagaaagttccttgcttcagcactcgaaattttcttcgccaaa

SEQ ID NO: 53193 - DNA, 50 bp, synthetic construct
  source 1..50: mol_type = other DNA
caccgaattcactgcatccgtcaattttcgagcagaccgtgaagcaggtg

SEQ ID NO: 53194 - DNA, 50 bp, synthetic construct
  source 1..50: mol_type = other DNA
aaaatatccttcttcaatcgccacatctttggatgcattctcaatcattt

SEQ ID NO: 53195 - DNA, 50 bp, synthetic construct
  source 1..50: mol_type = other DNA
gttcttctcttttttcaaataagatacattatgtatgtaatttatttaag

SEQ ID NO: 53196 - DNA, 50 bp, synthetic construct
  source 1..50: mol_type = other DNA
tccatgtcttgtgcttctctaccgtacgataaagaagtaatagaagtgta

SEQ ID NO: 53197 - DNA, 50 bp, synthetic construct
  source 1..50: mol_type = other DNA
gtcactttcataaaagggctaatgcccatgagccgcttgttgacgaggaa

SEQ ID NO: 53198 - DNA, 50 bp, synthetic construct
  source 1..50: mol_type = other DNA
cccacggaaatcactcttccaccgttgtgtggtctgtgctcaacaaatat

SEQ ID NO: 53199 - DNA, 50 bp, synthetic construct
  source 1..50: mol_type = other DNA
acatacatttaaaagttccataatataaaatatagcgtgatcatgaatga

SEQ ID NO: 53200 - DNA, 50 bp, synthetic construct
  source 1..50: mol_type = other DNA
aattttatacaatccgtaataaaaaagggttttacgatatgaataaaata

SEQ ID NO: 53201 - DNA, 50 bp, synthetic construct
  source 1..50: mol_type = other DNA
acgctcacaaaatatcacatcagtatactgatagattcctttgagaagtt

SEQ ID NO: 53202 - DNA, 50 bp, synthetic construct
  source 1..50: mol_type = other DNA
ccactattccgtatttcgattatacccgtcatatgcatccggaatatata

SEQ ID NO: 53203 - DNA, 50 bp, synthetic construct
  source 1..50: mol_type = other DNA
tcagcaacatacactaccacatagtcgatggattaataatataatgcgtc

SEQ ID NO: 53204 - DNA, 50 bp, synthetic construct
  source 1..50: mol_type = other DNA
cccgtataaacagcgtaagcatacggctttgcacctactgtgtcgacgta

SEQ ID NO: 53205 - DNA, 50 bp, synthetic construct
  source 1..50: mol_type = other DNA
gtttcgtggtttcaatgtacctaaaattaggtacattaaaactttttata

SEQ ID NO: 53206 - DNA, 50 bp, synthetic construct
  source 1..50: mol_type = other DNA
aatattatcgttacacaaataatatatataatttatataaattgtatatc

SEQ ID NO: 53207 - DNA, 50 bp, synthetic construct
  source 1..50: mol_type = other DNA
cttcataccatcactggataaagtatccatttaacgaactttctataaac

SEQ ID NO: 53208 - DNA, 50 bp, synthetic construct
  source 1..50: mol_type = other DNA
gcagaataaacgtccacttgaagggaccgccacaccattttcaattctgt

SEQ ID NO: 53209 - DNA, 50 bp, synthetic construct
  source 1..50: mol_type = other DNA
cattgttttatccctccatattaagttcgatatggattgatttagagatg

SEQ ID NO: 53210 - DNA, 50 bp, synthetic construct
  source 1..50: mol_type = other DNA
ctccttgacgttttgactttttcagtaaaaaaagtataaaccgcaggtgc

SEQ ID NO: 53211 - DNA, 50 bp, synthetic construct
  source 1..50: mol_type = other DNA
aatggtatcactatacttgataaaattttatcattgatttcaaatagttt

SEQ ID NO: 53212 - DNA, 50 bp, synthetic construct
  source 1..50: mol_type = other DNA
aatgcgtcccttccggcagtagaagatattgacggatatagggacggaag

SEQ ID NO: 53213 - DNA, 50 bp, synthetic construct
  source 1..50: mol_type = other DNA
aaaatggaactggagagcacttgtagaaaaggaaaataataatccatttt

SEQ ID NO: 53214 - DNA, 50 bp, synthetic construct
  source 1..50: mol_type = other DNA
ggcagatggtttatcctacaaggagtactttgtatgaataacgcaaaacg

SEQ ID NO: 53215 - DNA, 50 bp, synthetic construct
  source 1..50: mol_type = other DNA
aatttccacaccggaataaggaaagaaactctatcgccggtgtcggaaaa

SEQ ID NO: 53216 - DNA, 50 bp, synthetic construct
  source 1..50: mol_type = other DNA
cataatgatgcgactccaaaaggaaacaggaaagggggcgcagaacgatg

SEQ ID NO: 53217 - DNA, 50 bp, synthetic construct
  source 1..50: mol_type = other DNA
cgaggttgttcctcgggctttatacatataaatcttattcgaattttcga

SEQ ID NO: 53218 - DNA, 50 bp, synthetic construct
  source 1..50: mol_type = other DNA
accgcagggtcgttggttcgagtccagtgtcgaacccagctcctggggtt

SEQ ID NO: 53219 - DNA, 50 bp, synthetic construct
  source 1..50: mol_type = other DNA
tggcgaaagtgctgctaggaaggggttcctctctgtcagagcatttcagt

SEQ ID NO: 53220 - DNA, 50 bp, synthetic construct
  source 1..50: mol_type = other DNA
tgatatttggtgttctcttttttatttcagcgattatgtcaattatattt

SEQ ID NO: 53221 - DNA, 50 bp, synthetic construct
  source 1..50: mol_type = other DNA
gtatagaatcagaaatgaatgcgatttcaatgtcacggaagattttataa

SEQ ID NO: 53222 - DNA, 50 bp, synthetic construct
  source 1..50: mol_type = other DNA
gggctttagaaaagctgcaggaggggcctgcgtcagttttgtgtaaacaa

SEQ ID NO: 53223 - DNA, 50 bp, synthetic construct
  source 1..50: mol_type = other DNA
ttcttaaatacattccatacataaattatgaaaccttcttcatttgagaa

SEQ ID NO: 53224 - DNA, 50 bp, synthetic construct
  source 1..50: mol_type = other DNA
tcaccctaataaggatataaagatacttcttagttatataaatagggtga

SEQ ID NO: 53225 - DNA, 50 bp, synthetic construct
  source 1..50: mol_type = other DNA
aaagtgctactcttatcatataatcatttatatataaatcattaagcttt

SEQ ID NO: 53226 - DNA, 50 bp, synthetic construct
  source 1..50: mol_type = other DNA
ttaaattaaatttaatctctcttaaaaattaccaattaacatatatttaa

SEQ ID NO: 53227 - DNA, 50 bp, synthetic construct
  source 1..50: mol_type = other DNA
attttttatagcactaactgatactagtgtaagttagtactacgaaaaat

SEQ ID NO: 53228 - DNA, 50 bp, synthetic construct
  source 1..50: mol_type = other DNA
tttgtttatccccgaaaaatccccgaggtgatattttattgaataataat

SEQ ID NO: 53229 - DNA, 50 bp, synthetic construct
  source 1..50: mol_type = other DNA
acaatagccctagaacgaatctgaaaacagattcgttcaatcatgaagga

SEQ ID NO: 53230 - DNA, 50 bp, synthetic construct
  source 1..50: mol_type = other DNA
aacagaaaatgccttgcagtaaaattctttttaccaatagtttttctgtt

SEQ ID NO: 53231 - DNA, 50 bp, synthetic construct
  source 1..50: mol_type = other DNA
aataacgattaaatttacggcttgcgcaaaccgttcaaaacatcgaggag

SEQ ID NO: 53232 - DNA, 50 bp, synthetic construct
  source 1..50: mol_type = other DNA
acattctggaaagtgccggtgagctgattttcacctatttttctgaaact

SEQ ID NO: 53233 - DNA, 50 bp, synthetic construct
  source 1..50: mol_type = other DNA
ttattccaaaattaggagagaagtatactaccctttaaagcaccaaatga

SEQ ID NO: 53234 - DNA, 50 bp, synthetic construct
  source 1..50: mol_type = other DNA
gtatatgaagatgaatataataaatatatattataaatttgacaatttaa

SEQ ID NO: 53235 - DNA, 50 bp, synthetic construct
  source 1..50: mol_type = other DNA
gatagagatcaccctgaacggcaagcttgcgcgtcagcatgcctggacgg

SEQ ID NO: 53236 - DNA, 50 bp, synthetic construct
  source 1..50: mol_type = other DNA
atttccaattcgttttgggtgatcgcgaaacatttcggtcgcgagttcat

SEQ ID NO: 53237 - DNA, 50 bp, synthetic construct
  source 1..50: mol_type = other DNA
cggtgcccacgatgagcacggacggctggccgagcgcctcgtgcgtgagg

SEQ ID NO: 53238 - DNA, 50 bp, synthetic construct
  source 1..50: mol_type = other DNA
tccgggtcgctgtcgtcctcggcgacggcggagtagctcagccggttaga

SEQ ID NO: 53239 - DNA, 50 bp, synthetic construct
  source 1..50: mol_type = other DNA
cacaacacgtaaatgaaacctcaaatttgagaagtccagataactctact

SEQ ID NO: 53240 - DNA, 50 bp, synthetic construct
  source 1..50: mol_type = other DNA
actttcgacgctcgcgaccctcaatccttgcgggagcgattttcgacatc

SEQ ID NO: 53241 - DNA, 50 bp, synthetic construct
  source 1..50: mol_type = other DNA
ctcatggggcacctcccggcttcgtctaaagccgagtagttccctcgtag

SEQ ID NO: 53242 - DNA, 50 bp, synthetic construct
  source 1..50: mol_type = other DNA
tatgaaaaggatgtacattgaatgtgctttcaatcctttccaacccagta

SEQ ID NO: 53243 - DNA, 50 bp, synthetic construct
  source 1..50: mol_type = other DNA
actcattgagaagagagccatatgcaacttcaggtccgatcacaatgtca

SEQ ID NO: 53244 - DNA, 50 bp, synthetic construct
  source 1..50: mol_type = other DNA
cttcttccaaaacagcgacccggttgctggagtctatgccgacaaagccg

SEQ ID NO: 53245 - DNA, 50 bp, synthetic construct
  source 1..50: mol_type = other DNA
gactagcaacaaatcctaagacatataattcgtagggtgccttgctctct

SEQ ID NO: 53246 - DNA, 50 bp, synthetic construct
  source 1..50: mol_type = other DNA
atatatgtgcaagaaaaaggaaatttattttcttagcagcttgttcatca

SEQ ID NO: 53247 - DNA, 50 bp, synthetic construct
  source 1..50: mol_type = other DNA
taataactcccaaagtaattcaaatatgtgacactgacaaggagggatta

SEQ ID NO: 53248 - DNA, 50 bp, synthetic construct
  source 1..50: mol_type = other DNA
gatttgaagtaagagtatagaaatagacagaaaaatccttctttcaaaac

SEQ ID NO: 53249 - DNA, 50 bp, synthetic construct
  source 1..50: mol_type = other DNA
agaaatatcaagttatttagcccatatctgctaaaatcgctgtaaatcat

SEQ ID NO: 53250 - DNA, 50 bp, synthetic construct
  source 1..50: mol_type = other DNA
aaaggggagaaagtttggcggttgagctaaagcaaataaaaacttccttt

SEQ ID NO: 53251 - DNA, 50 bp, synthetic construct
  source 1..50: mol_type = other DNA
attcctgtatctgctttcccattgtagctgcataatgtttttagcagaaa

SEQ ID NO: 53252 - DNA, 50 bp, synthetic construct
  source 1..50: mol_type = other DNA
caatatagaaacttatagtaattttattcttcgaaaaaagttctgacctg

SEQ ID NO: 53253 - DNA, 50 bp, synthetic construct
  source 1..50: mol_type = other DNA
gttgcaggatatgcccgtgtttcaacagcaatgatataaaatcctgcatt

SEQ ID NO: 53254 - DNA, 50 bp, synthetic construct
  source 1..50: mol_type = other DNA
aggtgttataatgtcaccaaaattcgatattttcagtaattccttttgaa

SEQ ID NO: 53255 - DNA, 50 bp, synthetic construct
  source 1..50: mol_type = other DNA
ggacagagtatcggggatatcttcatagtgcgttctacgggaatatgtcc

SEQ ID NO: 53256 - DNA, 50 bp, synthetic construct
  source 1..50: mol_type = other DNA
gaatttacaagtgaaatatgtagaaatgatgcacctaacgttgaaaaatt

SEQ ID NO: 53257 - DNA, 50 bp, synthetic construct
  source 1..50: mol_type = other DNA
gggaacccttttctttctgaaaattccccctaagaagggaaaggattttt

SEQ ID NO: 53258 - DNA, 50 bp, synthetic construct
  source 1..50: mol_type = other DNA
gttacttatatcacttaaaaatgaccaactaaagtgattaatagtgtaac

SEQ ID NO: 53259 - DNA, 50 bp, synthetic construct
  source 1..50: mol_type = other DNA
tgtaggaatattaagtcttatttataaaaagaagaacatcaagtggtaca

SEQ ID NO: 53260 - DNA, 50 bp, synthetic construct
  source 1..50: mol_type = other DNA
aatttcatcaattacaccatcttcaagaagtaacaaccttagcttcattt

SEQ ID NO: 53261 - DNA, 50 bp, synthetic construct
  source 1..50: mol_type = other DNA
gttgaatttgtttctttttcttcataaatgcaaagtacatcaacccaaag

SEQ ID NO: 53262 - DNA, 50 bp, synthetic construct
  source 1..50: mol_type = other DNA
ctacttgtctcattctactttttttaaaaaaataaagaggtgagtatcaa

SEQ ID NO: 53263 - DNA, 50 bp, synthetic construct
  source 1..50: mol_type = other DNA
gcggaaaaacgataacagtcattccgagttgactgcgattgtatctcctc

SEQ ID NO: 53264 - DNA, 50 bp, synthetic construct
  source 1..50: mol_type = other DNA
tgctctggtgatttgtggaaccacagcaaggaggtgtaatcagtgagcgg

SEQ ID NO: 53265 - DNA, 50 bp, synthetic construct
  source 1..50: mol_type = other DNA
aataatcccttttttagccaaattccaaaatggagacaaaacggattata

SEQ ID NO: 53266 - DNA, 50 bp, synthetic construct
  source 1..50: mol_type = other DNA
ttaaactctacaatgccggtaatgtgcttagcaggggctacgatgttgaa

SEQ ID NO: 53267 - DNA, 50 bp, synthetic construct
  source 1..50: mol_type = other DNA
attgccggctggtggatggatggggccatatccacaatattatgggctat

SEQ ID NO: 53268 - DNA, 50 bp, synthetic construct
  source 1..50: mol_type = other DNA
tgacattgttggtttttctccttgtacaaattcatagtataattttgtta

SEQ ID NO: 53269 - DNA, 50 bp, synthetic construct
  source 1..50: mol_type = other DNA
ccagagtcaaaaggcgaaattcctcctggacgatcgccttgtgacgcgcc

SEQ ID NO: 53270 - DNA, 50 bp, synthetic construct
  source 1..50: mol_type = other DNA
ttttattttgtggtgtagaaaataatttttatcttttccaaatatcaaaa

SEQ ID NO: 53271 - DNA, 50 bp, synthetic construct
  source 1..50: mol_type = other DNA
ataaaacgacaaaggagaaatctgatcaaaatagttttttaggtgtttat

SEQ ID NO: 53272 - DNA, 50 bp, synthetic construct
  source 1..50: mol_type = other DNA
ttctgcttgcagcctcggatcttcatgaaaatggtggtgtcaaagcatat

SEQ ID NO: 53273 - DNA, 50 bp, synthetic construct
  source 1..50: mol_type = other DNA
tcacaatcgacatcgaagcataaaaatcgtcttttcgatctctattttgg

SEQ ID NO: 53274 - DNA, 50 bp, synthetic construct
  source 1..50: mol_type = other DNA
tttctgctaccgcagacagaacagaagcgttttgtctgcccaacgccaaa

SEQ ID NO: 53275 - DNA, 50 bp, synthetic construct
  source 1..50: mol_type = other DNA
caggacaaaagacagattggaagaattgttcattgttgtttcctttcttc

SEQ ID NO: 53276 - DNA, 50 bp, synthetic construct
  source 1..50: mol_type = other DNA
agacggaaatgtggcttaatttcacgcaaaagaacgcccttttgaaaagc

SEQ ID NO: 53277 - DNA, 50 bp, synthetic construct
  source 1..50: mol_type = other DNA
aaccgccgccacgcaggcgggtgccggccgtgttcttcgtggcgttggtg

SEQ ID NO: 53278 - DNA, 50 bp, synthetic construct
  source 1..50: mol_type = other DNA
atgaaagagcctcttccagcggcatcatgcgcttccacctgcctgtgtat

SEQ ID NO: 53279 - DNA, 50 bp, synthetic construct
  source 1..50: mol_type = other DNA
cttttggtttctaaatcaatcatcaaacagccctgccggatttctccaac

SEQ ID NO: 53280 - DNA, 50 bp, synthetic construct
  source 1..50: mol_type = other DNA
ttttcgctccaatttcatcacctgttttggagaggaaaaaggagtgaaaa

SEQ ID NO: 53281 - DNA, 50 bp, synthetic construct
  source 1..50: mol_type = other DNA
tacctttatatttccatgatcaagatctttgatctggagtgaaatcaata

SEQ ID NO: 53282 - DNA, 50 bp, synthetic construct
  source 1..50: mol_type = other DNA
agaaaaagaagaaaaaacttgaaattttttcaattttttcaatacgttct

SEQ ID NO: 53283 - DNA, 50 bp, synthetic construct
  source 1..50: mol_type = other DNA
tcgagtagttgcgcgtgtgaagaagggttgtaggttcgaatcctactcgg

SEQ ID NO: 53284 - DNA, 50 bp, synthetic construct
  source 1..50: mol_type = other DNA
cgtaggtgtaatgtagcacaacctgctccgcatgacctacgtcagataca

SEQ ID NO: 53285 - DNA, 50 bp, synthetic construct
  source 1..50: mol_type = other DNA
tcaatgatgtggttctctcgctggaagttttaagagaaccattggagagc

SEQ ID NO: 53286 - DNA, 50 bp, synthetic construct
  source 1..50: mol_type = other DNA
accagtgccgttatccgctgggccgcgcgcggccagaaactgtgtgccgt

SEQ ID NO: 53287 - DNA, 50 bp, synthetic construct
  source 1..50: mol_type = other DNA
ggtcgtcggccagcccgtctacaccttcaccgacgcaccttcggcaaaca

SEQ ID NO: 53288 - DNA, 50 bp, synthetic construct
  source 1..50: mol_type = other DNA
gcttttctcccgtctcggcttcatggaccatgccgaaaacggcgagtgtt

SEQ ID NO: 53289 - DNA, 50 bp, synthetic construct
  source 1..50: mol_type = other DNA
aaattagaatttgatggaaagtcagtaattctaccacaaaaaggaaattt

SEQ ID NO: 53290 - DNA, 50 bp, synthetic construct
  source 1..50: mol_type = other DNA
aaaacaaaaaaatgaagagaaaaaatttaatatagacataaacttaaaat

SEQ ID NO: 53291 - DNA, 50 bp, synthetic construct
  source 1..50: mol_type = other DNA
ttattatttacttattatattgtactaaaaattaaacgagtacattgtat

SEQ ID NO: 53292 - DNA, 50 bp, synthetic construct
  source 1..50: mol_type = other DNA
cccggcttcagtgtcgccacgctggtgcgcgtggtgcgattgttgccgca

SEQ ID NO: 53293 - DNA, 50 bp, synthetic construct
  source 1..50: mol_type = other DNA
tagtacattgtcattatatcagtcatatttgtattactgcctcttcacta

SEQ ID NO: 53294 - DNA, 50 bp, synthetic construct
  source 1..50: mol_type = other DNA
aaacaaattggttgatgcaatggtagcggagattatggcctaaaagactt

SEQ ID NO: 53295 - DNA, 50 bp, synthetic construct
  source 1..50: mol_type = other DNA
caaattgacgaataactaagtaatgcgtggctgttcatttcctcatcgta

SEQ ID NO: 53296 - DNA, 50 bp, synthetic construct
  source 1..50: mol_type = other DNA
ttcattaagagtaaaccagttatttatgaaaaccgtgtaccttgcctatg

SEQ ID NO: 53297 - DNA, 50 bp, synthetic construct
  source 1..50: mol_type = other DNA
gatcacatcaccgtgtacagcaaagatttgctccacagcgaagagtggca

SEQ ID NO: 53298 - DNA, 50 bp, synthetic construct
  source 1..50: mol_type = other DNA
ctatggttgccgccatgctttacgcgctatgggctatcaaacaacagtat

SEQ ID NO: 53299 - DNA, 50 bp, synthetic construct
  source 1..50: mol_type = other DNA
gtgtgtatacgcccacaatgcgcccggatgaaatgaaagcggaagcacga

SEQ ID NO: 53300 - DNA, 50 bp, synthetic construct
  source 1..50: mol_type = other DNA
atcatgcggaaacttagcaaccatacattgtctacaaaggcggagatgat

SEQ ID NO: 53301 - DNA, 50 bp, synthetic construct
  source 1..50: mol_type = other DNA
gtccttgttgtgggattccttatgaaatttctttatctcacaatggtata

SEQ ID NO: 53302 - DNA, 50 bp, synthetic construct
  source 1..50: mol_type = other DNA
ccaattttaattcggacattgtgatagctatgaaaacgataaagaaaatt

SEQ ID NO: 53303 - DNA, 50 bp, synthetic construct
  source 1..50: mol_type = other DNA
cttaaagatgaaaggtctgattactgcaaatccccaagcatttccttaaa

SEQ ID NO: 53304 - DNA, 50 bp, synthetic construct
  source 1..50: mol_type = other DNA
gaaaaatggcagcaaatagaaaagttcatctgaattttcaaatttttttc

SEQ ID NO: 53305 - DNA, 50 bp, synthetic construct
  source 1..50: mol_type = other DNA
gggtaaaagaaaaatcccgatcatcttgatgccgccaggttcttttacgg

SEQ ID NO: 53306 - DNA, 50 bp, synthetic construct
  source 1..50: mol_type = other DNA
cctgctagatgggtggattgtgccagaccagaacccaccgatcaagatgg

SEQ ID NO: 53307 - DNA, 50 bp, synthetic construct
  source 1..50: mol_type = other DNA
cacctgattgaggaattctggaagaatttcataaacatttgtaaaagcta

SEQ ID NO: 53308 - DNA, 50 bp, synthetic construct
  source 1..50: mol_type = other DNA
ttctgtcttgcttttatatcacattaaaaaaggaaaaattaaagtatctt

SEQ ID NO: 53309 - DNA, 50 bp, synthetic construct
  source 1..50: mol_type = other DNA
gggatacaaagcacaatataaaaatatttaaataagaatctttgtttagg

SEQ ID NO: 53310 - DNA, 50 bp, synthetic construct
  source 1..50: mol_type = other DNA
atctctgaaacctccctataattgatcaattatgttcacagccaaccatt

SEQ ID NO: 53311 - DNA, 50 bp, synthetic construct
  source 1..50: mol_type = other DNA
cgccgtcctgctgcggtggaagcaaatgccagagtttcaaagggtttgcg

SEQ ID NO: 53312 - DNA, 50 bp, synthetic construct
  source 1..50: mol_type = other DNA
cgcggtgctggccaccatcggccgcctggaacaaatccgccagcacctca

SEQ ID NO: 53313 - DNA, 50 bp, synthetic construct
  source 1..50: mol_type = other DNA
atgtagttaaagaaaatagaataaatatatctgctatccttttctggtat

SEQ ID NO: 53314 - DNA, 50 bp, synthetic construct
  source 1..50: mol_type = other DNA
ttgttttcatttttttgcttttttattaaaatcaggaaaactcgaaataa

SEQ ID NO: 53315 - DNA, 50 bp, synthetic construct
  source 1..50: mol_type = other DNA
gtcggaatgatccgaggaagcggatatagcattctgcgcttgattcgctt

SEQ ID NO: 53316 - DNA, 50 bp, synthetic construct
  source 1..50: mol_type = other DNA
tcttatttacgaacatatcaataatatgattgatgatgctaaaaatgagg

SEQ ID NO: 53317 - DNA, 50 bp, synthetic construct
  source 1..50: mol_type = other DNA
gcggttcagagccgcttgtgctaccggccgcgcagacgttggaggagcgg

SEQ ID NO: 53318 - DNA, 50 bp, synthetic construct
  source 1..50: mol_type = other DNA
tgtcattgaatgatagggggtttcccgaaatcccctctcaataacatctg

SEQ ID NO: 53319 - DNA, 50 bp, synthetic construct
  source 1..50: mol_type = other DNA
gcaaatgtaaaaaatatttctgcaattcacaaaattaattttagaacaaa

SEQ ID NO: 53320 - DNA, 50 bp, synthetic construct
  source 1..50: mol_type = other DNA
caaaggtattgtctttcccgtcttcaaggtattgtttattaataagtatt

SEQ ID NO: 53321 - DNA, 50 bp, synthetic construct
  source 1..50: mol_type = other DNA
cgaaaaggcaaaagaaaaagctgaaagggctattttctttctccttttac

SEQ ID NO: 53322 - DNA, 50 bp, synthetic construct
  source 1..50: mol_type = other DNA
taacacctaattccttagcaaccgctcgttatacgtcgatttaggccgct

SEQ ID NO: 53323 - DNA, 50 bp, synthetic construct
  source 1..50: mol_type = other DNA
aataaaaacatttactacgttaaaacttcaactttcgtgatttttttatt

SEQ ID NO: 53324 - DNA, 50 bp, synthetic construct
  source 1..50: mol_type = other DNA
ggagaaataatatctccttcgggatatcccaaaagcgatatgagcaaatt

SEQ ID NO: 53325 - DNA, 50 bp, synthetic construct
  source 1..50: mol_type = other DNA
gctgcaataatcaatacactaataataattcagaggtttttgtttgattt

SEQ ID NO: 53326 - DNA, 50 bp, synthetic construct
  source 1..50: mol_type = other DNA
gataggggcattggttagtaagtcatgagtttagaactaattcccttagt

SEQ ID NO: 53327 - DNA, 50 bp, synthetic construct
  source 1..50: mol_type = other DNA
ggtggattgtgccagaatgtgaagaatgccagattctgggccaacccgga

SEQ ID NO: 53328 - DNA, 50 bp, synthetic construct
  source 1..50: mol_type = other DNA
ggtgttgtatgccacacatcatgatatgctgctgcttgggcagcaaaaag

SEQ ID NO: 53329 - DNA, 50 bp, synthetic construct
  source 1..50: mol_type = other DNA
tggtgtatttaaacgtgtctaataaaaatcatcaaggtctaaatacactg

SEQ ID NO: 53330 - DNA, 50 bp, synthetic construct
  source 1..50: mol_type = other DNA
gccttggtctccggagggacgatcaacatgtgacctacggaaggtgaggt

SEQ ID NO: 53331 - DNA, 50 bp, synthetic construct
  source 1..50: mol_type = other DNA
tgcagggtgttttctgttgcaaaaactttcaaaacagactataccttaca

SEQ ID NO: 53332 - DNA, 50 bp, synthetic construct
  source 1..50: mol_type = other DNA
tcctgtcgcttcttctcatcccagctggggtatgtgaaacgggatctgga

SEQ ID NO: 53333 - DNA, 50 bp, synthetic construct
  source 1..50: mol_type = other DNA
tgtggtaagcccaccatgctttatgcataaacaattcaggagttgccgga

SEQ ID NO: 53334 - DNA, 50 bp, synthetic construct
  source 1..50: mol_type = other DNA
acgctccgctgtacaccttgaaatacggcttcgcagcgacaggttggcgg

SEQ ID NO: 53335 - DNA, 50 bp, synthetic construct
  source 1..50: mol_type = other DNA
gtgcttgttaaaaataatttcacactggctgaaaaacttttgacaacaat

SEQ ID NO: 53336 - DNA, 50 bp, synthetic construct
  source 1..50: mol_type = other DNA
cgtaaatgatcgcttttttcatcggcggatgccaaaaagaatccgcttgc

SEQ ID NO: 53337 - DNA, 50 bp, synthetic construct
  source 1..50: mol_type = other DNA
cgaaaaccttgaccaacataatacattgattatgtcaagaaaaaaccgca

SEQ ID NO: 53338 - DNA, 50 bp, synthetic construct
  source 1..50: mol_type = other DNA
gacgatttggccaatggtagttatcctgtacttatttttggataatcggc

SEQ ID NO: 53339 - DNA, 50 bp, synthetic construct
  source 1..50: mol_type = other DNA
gcaacttaccaaaatttttaagaacccatttgaaaatcctataaacaaga

SEQ ID NO: 53340 - DNA, 50 bp, synthetic construct
  source 1..50: mol_type = other DNA
taaagtgtactggctatttgcactgcataacaagatgccagtaaataggt

SEQ ID NO: 53341 - DNA, 50 bp, synthetic construct
  source 1..50: mol_type = other DNA
gctgtggcagggtcgagcagtggagccatcccaaggaatggggccatagc

SEQ ID NO: 53342 - DNA, 50 bp, synthetic construct
  source 1..50: mol_type = other DNA
cgcctcgaacgctgccgcgtcgcgctccaccgccggctgcagcaccggcc

SEQ ID NO: 53343 - DNA, 50 bp, synthetic construct
  source 1..50: mol_type = other DNA
cgagaagaccatggccatgccggacctccaatgtggacacggttgtaaac

SEQ ID NO: 53344 - DNA, 50 bp, synthetic construct
  source 1..50: mol_type = other DNA
atgtccgcagcacgctggcggaagcgctcccgcactagtcgtggagcgct

SEQ ID NO: 53345 - DNA, 50 bp, synthetic construct
  source 1..50: mol_type = other DNA
tgtccagcattgaacatgggcgctgcagcgccccgcagaccgaacagcca

SEQ ID NO: 53346 - DNA, 50 bp, synthetic construct
  source 1..50: mol_type = other DNA
ttccatagttgcacctaaccaaacggaaatggttaatgtaatctatggaa

SEQ ID NO: 53347 - DNA, 50 bp, synthetic construct
  source 1..50: mol_type = other DNA
ggggcagtaaattgcaaaataaactagttttttgcattaaaaattgatgt

SEQ ID NO: 53348 - DNA, 50 bp, synthetic construct
  source 1..50: mol_type = other DNA
aaataaaacctacttttttctatacttatacgtcaaatcgcttgatataa

SEQ ID NO: 53349 - DNA, 50 bp, synthetic construct
  source 1..50: mol_type = other DNA
tttttcttttgcgattctgattcctttaaatcaatatggcaaataaagta

SEQ ID NO: 53350 - DNA, 50 bp, synthetic construct
  source 1..50: mol_type = other DNA
aataattcagcggtctttgctgaatgccaaggaaagaaaggtgaaaggta

SEQ ID NO: 53351 - DNA, 50 bp, synthetic construct
  source 1..50: mol_type = other DNA
atgaagtccaaacagctccatctggcgcaatggcagcgtggggacttcaa

SEQ ID NO: 53352 - DNA, 50 bp, synthetic construct
  source 1..50: mol_type = other DNA
aatcacctcgctcttaataagactatcttgacggagagcgtttcttgaaa

SEQ ID NO: 53353 - DNA, 50 bp, synthetic construct
  source 1..50: mol_type = other DNA
catctttatttgagataatatccttttgaatgttatatccaaaaggtata

SEQ ID NO: 53354 - DNA, 50 bp, synthetic construct
  source 1..50: mol_type = other DNA
tttttctcaatcatctctttacaaatggaggaaaacgacaatgagtaaaa

SEQ ID NO: 53355 - DNA, 50 bp, synthetic construct
  source 1..50: mol_type = other DNA
gggtaagctctttcttttcttcatataagaagaaaaggaatattttacaa

SEQ ID NO: 53356 - DNA, 50 bp, synthetic construct
  source 1..50: mol_type = other DNA
agagcatttcgccccaaagcccgctttcgccgttgccatcgtgccgctca

SEQ ID NO: 53357 - DNA, 50 bp, synthetic construct
  source 1..50: mol_type = other DNA
ctgcggtattgccaaaatcctcaccgcagaaatccctggataataagcac

SEQ ID NO: 53358 - DNA, 50 bp, synthetic construct
  source 1..50: mol_type = other DNA
attccatgcagggtattacccttgcgaaagctggagtcccgaaatgaagg

SEQ ID NO: 53359 - DNA, 50 bp, synthetic construct
  source 1..50: mol_type = other DNA
gatttttcctgctcatagttttctccagggcgctgctggcgatttttatg

SEQ ID NO: 53360 - DNA, 50 bp, synthetic construct
  source 1..50: mol_type = other DNA
tgcaattccgcttttgaaaatcatatataattttgtaatctatacttgag

SEQ ID NO: 53361 - DNA, 50 bp, synthetic construct
  source 1..50: mol_type = other DNA
ccatcttgaaattgcttatcaatgaaaagaattaatctctgaaaagatag

SEQ ID NO: 53362 - DNA, 50 bp, synthetic construct
  source 1..50: mol_type = other DNA
accccgcaactgccggtggcaaagatcaccggcaaaggtagttacaggca

SEQ ID NO: 53363 - DNA, 50 bp, synthetic construct
  source 1..50: mol_type = other DNA
ctggttgtggaaagtcactaaatgctgttttcttgactttacagggcctt

SEQ ID NO: 53364 - DNA, 50 bp, synthetic construct
  source 1..50: mol_type = other DNA
accttttcataggtttccgaatccaatgtttcggacggtcatggttcgga

SEQ ID NO: 53365 - DNA, 50 bp, synthetic construct
  source 1..50: mol_type = other DNA
acggcttcccgacacggtaacccaaccacgttcttgaccggggtcagggt

SEQ ID NO: 53366 - DNA, 50 bp, synthetic construct
  source 1..50: mol_type = other DNA
tataaaaacatcgataaaatctacatcacgattaaggatcgcattttata

SEQ ID NO: 53367 - DNA, 50 bp, synthetic construct
  source 1..50: mol_type = other DNA
cacctggaataatatgaatttatagaaaccgattgctattatgccaaata

SEQ ID NO: 53368 - DNA, 50 bp, synthetic construct
  source 1..50: mol_type = other DNA
cttgacgtggtgttataatattgatatcacaaaatgcgccataactcaag

SEQ ID NO: 53369 - DNA, 50 bp, synthetic construct
  source 1..50: mol_type = other DNA
agcaccgtgcgcgccgagcaccagatctgtatgtcggctccggcggcgcc

SEQ ID NO: 53370 - DNA, 50 bp, synthetic construct
  source 1..50: mol_type = other DNA
gcgtcggccacgattacatggacacgaggccttgcgagaatgaccgccgc

SEQ ID NO: 53371 - DNA, 50 bp, synthetic construct
  source 1..50: mol_type = other DNA
ttgccgatccggtgaaccgctgtgggcgccggtgttcagcaccatggcgg

SEQ ID NO: 53372 - DNA, 50 bp, synthetic construct
  source 1..50: mol_type = other DNA
atgagcctgacgagctaccgggctgctcgccgacagctatcactgctcgc

SEQ ID NO: 53373 - DNA, 50 bp, synthetic construct
  source 1..50: mol_type = other DNA
tgtttgtcatgtaaaatattgaataaaataggcattcatcttagacaagg

SEQ ID NO: 53374 - DNA, 50 bp, synthetic construct
  source 1..50: mol_type = other DNA
gtgaagcaccggagcaaattgaggaagagccctggaatcaggtgatataa

SEQ ID NO: 53375 - DNA, 50 bp, synthetic construct
  source 1..50: mol_type = other DNA
agtccacccgccactcgacggagcagatctggtatgaatgccacaccacg

SEQ ID NO: 53376 - DNA, 50 bp, synthetic construct
  source 1..50: mol_type = other DNA
agaatgccgacgcactcgcccttggccgttcgcgaccgcgaaggcggtct

SEQ ID NO: 53377 - DNA, 50 bp, synthetic construct
  source 1..50: mol_type = other DNA
ttctgagaaagcgatgggaaatgcaggctaatgaccgcactaaaacagat

SEQ ID NO: 53378 - DNA, 50 bp, synthetic construct
  source 1..50: mol_type = other DNA
atagagagcagcgcgtttcataggggcctatgaaacgcgcgggtcattga

SEQ ID NO: 53379 - DNA, 50 bp, synthetic construct
  source 1..50: mol_type = other DNA
acagggctggaaattcaatagaaggccgcaaaagaccttttttgccctgc

SEQ ID NO: 53380 - DNA, 50 bp, synthetic construct
  source 1..50: mol_type = other DNA
tgaaattttagaaatgcaagaacgatccccctttcgcatctaagccttca

SEQ ID NO: 53381 - DNA, 50 bp, synthetic construct
  source 1..50: mol_type = other DNA
attcggaaaaccagcgatccaagggagaatggagcagggtatttcttttt

SEQ ID NO: 53382 - DNA, 50 bp, synthetic construct
  source 1..50: mol_type = other DNA
tcatggcgcaggttcctcatctgatttcgtcagcagatcctcggcaatag

SEQ ID NO: 53383 - DNA, 50 bp, synthetic construct
  source 1..50: mol_type = other DNA
cgattgggtgacagactcgcttggggccaagcgatcaagtcacctcggat

SEQ ID NO: 53384 - DNA, 50 bp, synthetic construct
  source 1..50: mol_type = other DNA
tgctgatcggcaggcgcggcgacccggtctgccccgactgccagtcacgc

SEQ ID NO: 53385 - DNA, 50 bp, synthetic construct
  source 1..50: mol_type = other DNA
gctattccatgctggtcaatgacagctcagtgtgataagctgagaacaaa

SEQ ID NO: 53386 - DNA, 50 bp, synthetic construct
  source 1..50: mol_type = other DNA
ccgcccattatgccgggtgcgctccggcgatgcggtggcggggtgttcgg

SEQ ID NO: 53387 - DNA, 50 bp, synthetic construct
  source 1..50: mol_type = other DNA
ggcgtgtcggatcctgtcgctgcgcgtctagcggtctaggacgtcgccct

SEQ ID NO: 53388 - DNA, 50 bp, synthetic construct
  source 1..50: mol_type = other DNA
tggccgaacaggaggccggcgagcgccccagccggactcccgctggatcg

SEQ ID NO: 53389 - DNA, 50 bp, synthetic construct
  source 1..50: mol_type = other DNA
ttcggtgtgagcaaaggggtttcgtccaaaacctccccgaccaactcgaa

SEQ ID NO: 53390 - DNA, 50 bp, synthetic construct
  source 1..50: mol_type = other DNA
gagcctacgtccgatattgcatttttctatttcatattttaccacaaaaa

SEQ ID NO: 53391 - DNA, 50 bp, synthetic construct
  source 1..50: mol_type = other DNA
aaagcctttatttatcaagtcataagttcaatccttgcaatcaaggcttt

SEQ ID NO: 53392 - DNA, 50 bp, synthetic construct
  source 1..50: mol_type = other DNA
cgtaatcacctgcaaatggactattaattcaccatcaattatgatttata

SEQ ID NO: 53393 - DNA, 50 bp, synthetic construct
  source 1..50: mol_type = other DNA
tatatatcactctaaagggaatattaatattccccatctttatttttatt

SEQ ID NO: 53394 - DNA, 50 bp, synthetic construct
  source 1..50: mol_type = other DNA
tgcgagtcagaaacacaacttacaacggcatgttgtggggcagctttatg

SEQ ID NO: 53395 - DNA, 50 bp, synthetic construct
  source 1..50: mol_type = other DNA
ctcatttctattttatcttgtttgtagctccattccaacaaggaaaggag

SEQ ID NO: 53396 - DNA, 50 bp, synthetic construct
  source 1..50: mol_type = other DNA
cacagtcaaggctcattttgctggaaaaaagaaattgagcgttgtcttta

SEQ ID NO: 53397 - DNA, 50 bp, synthetic construct
  source 1..50: mol_type = other DNA
tttcataagcattgcacaccgtcctgcaacggcttgcaacaaacttaaaa

SEQ ID NO: 53398 - DNA, 50 bp, synthetic construct
  source 1..50: mol_type = other DNA
aaagttccggtggcttaaactccatttgtgtaataattgacctgattctc

SEQ ID NO: 53399 - DNA, 50 bp, synthetic construct
  source 1..50: mol_type = other DNA
ccgcatacgcaaagctgcgcggatcatgagtgccaggcttgcgaatgcca

SEQ ID NO: 53400 - DNA, 50 bp, synthetic construct
  source 1..50: mol_type = other DNA
gatttcgataatcgtaaaggctgaatttttgtttgtgaaacaacgaacat

SEQ ID NO: 53401 - DNA, 50 bp, synthetic construct
  source 1..50: mol_type = other DNA
tcctccgatgtattttttatattcttcaataagcaaaagagctcggacat

SEQ ID NO: 53402 - DNA, 50 bp, synthetic construct
  source 1..50: mol_type = other DNA
cttcaaaaaccacccctttaaggttctggaagaacagggcattttgaaag

SEQ ID NO: 53403 - DNA, 50 bp, synthetic construct
  source 1..50: mol_type = other DNA
aataatagcaagtgttttcttgaatacataagcttacccttcatatgctc

SEQ ID NO: 53404 - DNA, 50 bp, synthetic construct
  source 1..50: mol_type = other DNA
cccctcacgaaccgcctgcttgcgcggtgctgccgaaggggcttgaggga

SEQ ID NO: 53405 - DNA, 50 bp, synthetic construct
  source 1..50: mol_type = other DNA
tccccttcgatcagctcctccagaattgagcgggttggtgacgaaggcca

SEQ ID NO: 53406 - DNA, 50 bp, synthetic construct
  source 1..50: mol_type = other DNA
gtagattttttataatctgttttgtacaaaataaatgatacaatattcag

SEQ ID NO: 53407 - DNA, 50 bp, synthetic construct
  source 1..50: mol_type = other DNA
aataaaaaagagataaggtcttgaatgcatagaattatcacttttttata

SEQ ID NO: 53408 - DNA, 50 bp, synthetic construct
  source 1..50: mol_type = other DNA
tttttatgctcgaatcaagaattttaaaactctctataatttccataaaa

SEQ ID NO: 53409 - DNA, 50 bp, synthetic construct
  source 1..50: mol_type = other DNA
acctacaatgtaagcccagcatgcatcactgaccggctttaataccaggc

SEQ ID NO: 53410 - DNA, 50 bp, synthetic construct
  source 1..50: mol_type = other DNA
attaacatcttataaattacagttatacatctaaagtatattcagcctac

SEQ ID NO: 53411 - DNA, 50 bp, synthetic construct
  source 1..50: mol_type = other DNA
gagcaaaggaaaaacttaaaataagcgtgacttcggtcacgccttttctt

SEQ ID NO: 53412 - DNA, 50 bp, synthetic construct
  source 1..50: mol_type = other DNA
gctagaatcggaaacagcgtagtgcccgctgcgttgcatccgaatcccat

SEQ ID NO: 53413 - DNA, 50 bp, synthetic construct
  source 1..50: mol_type = other DNA
ccgagtgctccgccgaggtcacctgcattgatttttagtagagcgatcgt

SEQ ID NO: 53414 - DNA, 50 bp, synthetic construct
  source 1..50: mol_type = other DNA
ttgccattcttatcatcctttctctgactcaaagcggtaaaacatgccat

SEQ ID NO: 53415 - DNA, 50 bp, synthetic construct
  source 1..50: mol_type = other DNA
tttggtaagctacatttggcattgtaggctgccacccttatcttcttttc

SEQ ID NO: 53416 - DNA, 50 bp, synthetic construct
  source 1..50: mol_type = other DNA
taaattaaattacatacaacatattaatatgttgtatgtaattaggtgga

SEQ ID NO: 53417 - DNA, 50 bp, synthetic construct
  source 1..50: mol_type = other DNA
tttataatcaataaattagaatctttaaattttaattaataacctaccat

SEQ ID NO: 53418 - DNA, 50 bp, synthetic construct
  source 1..50: mol_type = other DNA
ttacataacaattataacatttattggaagatgaaataatttataattct

SEQ ID NO: 53419 - DNA, 50 bp, synthetic construct
  source 1..50: mol_type = other DNA
cttcatatagttccttatctataatattattgatactggtattctataac

SEQ ID NO: 53420 - DNA, 50 bp, synthetic construct
  source 1..50: mol_type = other DNA
cgggcagcctgcgtcggtgagctgccaatctcagcgatgagcagtgcgcg

SEQ ID NO: 53421 - DNA, 50 bp, synthetic construct
  source 1..50: mol_type = other DNA
tttaataattcaatataaggttttaaaaaaatagcccgattaattttcgg

SEQ ID NO: 53422 - DNA, 50 bp, synthetic construct
  source 1..50: mol_type = other DNA
cttgataaagatttaagaaacatccagattttcaagcattctagttcatc

SEQ ID NO: 53423 - DNA, 50 bp, synthetic construct
  source 1..50: mol_type = other DNA
acttttttcataatagacctccattaagaggtgaaaattatggcaaaaga

SEQ ID NO: 53424 - DNA, 50 bp, synthetic construct
  source 1..50: mol_type = other DNA
ttttatggaaattatagagagttttaaaattcttgattttggcataaaaa

SEQ ID NO: 53425 - DNA, 50 bp, synthetic construct
  source 1..50: mol_type = other DNA
tgccgaaataacggtgctttcggagtatcgtaagattcgtagatctggta

SEQ ID NO: 53426 - DNA, 50 bp, synthetic construct
  source 1..50: mol_type = other DNA
tgttgaaggcgagtatgagtcggcgaaacgactggataaacacttggttt

SEQ ID NO: 53427 - DNA, 50 bp, synthetic construct
  source 1..50: mol_type = other DNA
ttgtcattgacggtatcggttataagtgtaaatgacacatacatggacgc

SEQ ID NO: 53428 - DNA, 50 bp, synthetic construct
  source 1..50: mol_type = other DNA
ggacagagtattatattctgaaaatgcattaagaatccttataagtgaat

SEQ ID NO: 53429 - DNA, 50 bp, synthetic construct
  source 1..50: mol_type = other DNA
aaatatataaacaatatcacaactattattataacattctaaaaataagc

SEQ ID NO: 53430 - DNA, 50 bp, synthetic construct
  source 1..50: mol_type = other DNA
acccgcttcacggctacgcctatcacgaaggaactccttggtttgcacgt

SEQ ID NO: 53431 - DNA, 50 bp, synthetic construct
  source 1..50: mol_type = other DNA
tagcaacacctcgcattacattgttaaaaatcgggaaataggtgtaaaat

SEQ ID NO: 53432 - DNA, 50 bp, synthetic construct
  source 1..50: mol_type = other DNA
gttgttttctaaatccacattgcgccaaacggaagaattctgaaggcaaa

SEQ ID NO: 53433 - DNA, 50 bp, synthetic construct
  source 1..50: mol_type = other DNA
cgttgcagcactttttgctccatatttatggaggataaagctgatgaaca

SEQ ID NO: 53434 - DNA, 50 bp, synthetic construct
  source 1..50: mol_type = other DNA
caccttttgattttgccacactttattgaatttgcaaatctcaaaggcaa

SEQ ID NO: 53435 - DNA, 50 bp, synthetic construct
  source 1..50: mol_type = other DNA
agttatatcaagggttttcccgacaaaaaaagataaatgatgatacaact

SEQ ID NO: 53436 - DNA, 50 bp, synthetic construct
  source 1..50: mol_type = other DNA
gtatctcggatgtggtagaggaaatgattcagacaggacattcgagtgga

SEQ ID NO: 53437 - DNA, 50 bp, synthetic construct
  source 1..50: mol_type = other DNA
ggaaaggtttttgcttttctgaattttcacagaaaagacttgatattata

SEQ ID NO: 53438 - DNA, 50 bp, synthetic construct
  source 1..50: mol_type = other DNA
ccagatcctgagcgtttggttccgggcggcaaccgtccggaaggatatcg

SEQ ID NO: 53439 - DNA, 50 bp, synthetic construct
  source 1..50: mol_type = other DNA
ttaaacaaactttctaaccgactaaaaaaagatttcagaatattcttaaa

SEQ ID NO: 53440 - DNA, 50 bp, synthetic construct
  source 1..50: mol_type = other DNA
ataaaaataaattgacatgaaatttaaattaaattactacgctttttatg

SEQ ID NO: 53441 - DNA, 50 bp, synthetic construct
  source 1..50: mol_type = other DNA
atttccttatcacaatactattttaatccgtatctttgcgaaaaggaaaa

SEQ ID NO: 53442 - DNA, 50 bp, synthetic construct
  source 1..50: mol_type = other DNA
aagacttgctttttttctatatctatacaatttataaaaaaggaagtgtt

SEQ ID NO: 53443 - DNA, 50 bp, synthetic construct
  source 1..50: mol_type = other DNA
aattgcaagcatatttttcaaaaaattacttcaaaaatatatttacaatc

SEQ ID NO: 53444 - DNA, 50 bp, synthetic construct
  source 1..50: mol_type = other DNA
taaagaaaaaatcaaagattttatcaggtaatcatctgagttttccttat

SEQ ID NO: 53445 - DNA, 50 bp, synthetic construct
  source 1..50: mol_type = other DNA
tgagaaatataaaaacatagctttataaaacaagtctttacggtttctca

SEQ ID NO: 53446 - DNA, 50 bp, synthetic construct
  source 1..50: mol_type = other DNA
ccatattgacatctgtttttgggttaacacaaaaagaattgtcactaact

SEQ ID NO: 53447 - DNA, 50 bp, synthetic construct
  source 1..50: mol_type = other DNA
tagtttatctaagagtaaagaaagaattctaaaaatggttagataaaata

SEQ ID NO: 53448 - DNA, 50 bp, synthetic construct
  source 1..50: mol_type = other DNA
ttttgcactagaggttttgctttgaacatttgaaaacaatatgtctcaat

SEQ ID NO: 53449 - DNA, 50 bp, synthetic construct
  source 1..50: mol_type = other DNA
aataaaagtatgtaaggcgcttaactacaacagcctttccatcttcaatt

SEQ ID NO: 53450 - DNA, 50 bp, synthetic construct
  source 1..50: mol_type = other DNA
cataatccctaatagtttaaagtcaggagcaaaaaccattaattatgacg

SEQ ID NO: 53451 - DNA, 50 bp, synthetic construct
  source 1..50: mol_type = other DNA
ttcttaatttatataaaccgctcagccgagaataaaataaagcggcagaa

SEQ ID NO: 53452 - DNA, 50 bp, synthetic construct
  source 1..50: mol_type = other DNA
tcagcattttcctgcctttgtgccactgcacaaacgttttcatttgctgt

SEQ ID NO: 53453 - DNA, 50 bp, synthetic construct
  source 1..50: mol_type = other DNA
ccgcacggttcctgctcgtcctcgccggagaccgggcaggccacgggcga

SEQ ID NO: 53454 - DNA, 50 bp, synthetic construct
  source 1..50: mol_type = other DNA
aatcaaaattctccatattgtgtatcttcatgcattggataatttgaact

SEQ ID NO: 53455 - DNA, 50 bp, synthetic construct
  source 1..50: mol_type = other DNA
agggcggacaccgttcttgatcggcaatcctcaaggatgttgtccttgct

SEQ ID NO: 53456 - DNA, 50 bp, synthetic construct
  source 1..50: mol_type = other DNA
cggcggcggctttcatttcatctgtccagctgttcagagccgagccggga

SEQ ID NO: 53457 - DNA, 50 bp, synthetic construct
  source 1..50: mol_type = other DNA
aaattgaacgaaaacaggaaggtattgaccttcctcttttttgtgaggaa

SEQ ID NO: 53458 - DNA, 50 bp, synthetic construct
  source 1..50: mol_type = other DNA
aaagaaggaaaagcggtaatttctgaagataccttctcggcagataataa

SEQ ID NO: 53459 - DNA, 50 bp, synthetic construct
  source 1..50: mol_type = other DNA
tatagttatcctgtttagccatactcattaggataaacaggataactatt

SEQ ID NO: 53460 - DNA, 50 bp, synthetic construct
  source 1..50: mol_type = other DNA
ctcacgaaaagaaaaaatatcatctttgttcccttacgaaaaatcctgag

SEQ ID NO: 53461 - DNA, 50 bp, synthetic construct
  source 1..50: mol_type = other DNA
tcagtaatgttcatgtctttctccttcaagtaattcatcaatattattgt

SEQ ID NO: 53462 - DNA, 50 bp, synthetic construct
  source 1..50: mol_type = other DNA
ataattctaactgtccaggaaagaatatttttggcaattacttttgtggc

SEQ ID NO: 53463 - DNA, 50 bp, synthetic construct
  source 1..50: mol_type = other DNA
ccaagcagaaagctttgttccgtcaataccagcgttgcctttcatcttgt

SEQ ID NO: 53464 - DNA, 50 bp, synthetic construct
  source 1..50: mol_type = other DNA
tgattctataaataactcaggagtatcactgagccagtttattacaaggc

SEQ ID NO: 53465 - DNA, 50 bp, synthetic construct
  source 1..50: mol_type = other DNA
cgccagcaggttgatcgcttcctcgagacttcgcccatctccaggtggcg

SEQ ID NO: 53466 - DNA, 50 bp, synthetic construct
  source 1..50: mol_type = other DNA
tcaaaaggaaagtctcttacagcatatgccctaaatgacttgctatttgc

SEQ ID NO: 53467 - DNA, 50 bp, synthetic construct
  source 1..50: mol_type = other DNA
tggcagaaataagaaatccatttggtgaaaaaggtttctgacgatccctt

SEQ ID NO: 53468 - DNA, 50 bp, synthetic construct
  source 1..50: mol_type = other DNA
aattatattaaaaatgagtacaaaaatactttcccatcatttactggatt

SEQ ID NO: 53469 - DNA, 50 bp, synthetic construct
  source 1..50: mol_type = other DNA
cgacgtcggcacgcgtgatgctcacgtgatgatcgaggccttcgagcatc

SEQ ID NO: 53470 - DNA, 50 bp, synthetic construct
  source 1..50: mol_type = other DNA
tatactactaactgaacccctccggtcggtaggttcaatttagtagtatg

SEQ ID NO: 53471 - DNA, 50 bp, synthetic construct
  source 1..50: mol_type = other DNA
atgaactggtagatctgactttccgaggatcagcagaaagaccagtaaat

SEQ ID NO: 53472 - DNA, 50 bp, synthetic construct
  source 1..50: mol_type = other DNA
atctacttcagatgttggaaccacctcatctttaaacatttgtcttatat

SEQ ID NO: 53473 - DNA, 50 bp, synthetic construct
  source 1..50: mol_type = other DNA
cgcctccttttttggtagtatatctaaatatacttaaagaaacaattgct

SEQ ID NO: 53474 - DNA, 50 bp, synthetic construct
  source 1..50: mol_type = other DNA
attaggctttttatagtagtcttggtggacgctactacaaaaagcccaat

SEQ ID NO: 53475 - DNA, 50 bp, synthetic construct
  source 1..50: mol_type = other DNA
aatcttttctagatggattactccatttaagtctcacaatagtcctaatt

SEQ ID NO: 53476 - DNA, 50 bp, synthetic construct
  source 1..50: mol_type = other DNA
cttccgtactttatccctccgggcattagcggaagcgtccacaacgggct

SEQ ID NO: 53477 - DNA, 50 bp, synthetic construct
  source 1..50: mol_type = other DNA
caaaaaaagagttatattaaaaaaatttttttacatttgctcttttaccc

SEQ ID NO: 53478 - DNA, 50 bp, synthetic construct
  source 1..50: mol_type = other DNA
ccttttatatatttttctttcagtgtgctgtgttttccctgtatacgatt

SEQ ID NO: 53479 - DNA, 50 bp, synthetic construct
  source 1..50: mol_type = other DNA
tatgatctttccactcaatggtaattatacccttttttagagggaattat

SEQ ID NO: 53480 - DNA, 50 bp, synthetic construct
  source 1..50: mol_type = other DNA
ggatccccggttttgccttgcgcaaaatctgtgcggaaagtgcgggatcc

SEQ ID NO: 53481 - DNA, 50 bp, synthetic construct
  source 1..50: mol_type = other DNA
tgtttctcaggatgatttttcagaaaggtgaaaggtaatctaagaaaaca

SEQ ID NO: 53482 - DNA, 50 bp, synthetic construct
  source 1..50: mol_type = other DNA
gaatccaaaattacattgataatatagatatcttccctaatctcagatag

SEQ ID NO: 53483 - DNA, 50 bp, synthetic construct
  source 1..50: mol_type = other DNA
tgcgatccggtgctgcttctgccggccgcggcgcgaaacgccggaacgac

SEQ ID NO: 53484 - DNA, 50 bp, synthetic construct
  source 1..50: mol_type = other DNA
gttgtaatctttagaaaaaaacagaaatattttttaataaagatttgaat

SEQ ID NO: 53485 - DNA, 50 bp, synthetic construct
  source 1..50: mol_type = other DNA
aacaacgctagattttactgaaaatatttgtacgggaatatagcatcaaa

SEQ ID NO: 53486 - DNA, 50 bp, synthetic construct
  source 1..50: mol_type = other DNA
tcactaccccccatagtttaggatgcaatatgaactgattaagatagtag

SEQ ID NO: 53487 - DNA, 50 bp, synthetic construct
  source 1..50: mol_type = other DNA
attatagatgagaataattttgtagatacaaaacgggaaggaggtaaaat

SEQ ID NO: 53488 - DNA, 50 bp, synthetic construct
  source 1..50: mol_type = other DNA
aatcaaatgcttttaagatttctttatagacacgagaaaaggaggatatt

SEQ ID NO: 53489 - DNA, 50 bp, synthetic construct
  source 1..50: mol_type = other DNA
ggttactgtcgatgaaaaggcagcaggctttctttttttctaaaccgtca

SEQ ID NO: 53490 - DNA, 50 bp, synthetic construct
  source 1..50: mol_type = other DNA
attataaaaataatattacctgtgatcatatctatcttcctttttacgca

SEQ ID NO: 53491 - DNA, 50 bp, synthetic construct
  source 1..50: mol_type = other DNA
ttatttaaagacaacatgagcattatagcggtcataccgtggtataatcc

SEQ ID NO: 53492 - DNA, 50 bp, synthetic construct
  source 1..50: mol_type = other DNA
ctctttttttctggccataaaaactcctttattaacaagtagaaaatcag

SEQ ID NO: 53493 - DNA, 50 bp, synthetic construct
  source 1..50: mol_type = other DNA
atatatatagacaaatatttaatcgcaataaaataaagcattataaatca

SEQ ID NO: 53494 - DNA, 50 bp, synthetic construct
  source 1..50: mol_type = other DNA
tatcggcaaaattgattgacgcaataatctttccattcattttcttaatg

SEQ ID NO: 53495 - DNA, 50 bp, synthetic construct
  source 1..50: mol_type = other DNA
accttgttttgattttctgacgagaggaatacaaaatgcaaatataaaag

SEQ ID NO: 53496 - DNA, 50 bp, synthetic construct
  source 1..50: mol_type = other DNA
ctaaactgaccgtctttgttttataaagaaagactaaattttccatagga

SEQ ID NO: 53497 - DNA, 50 bp, synthetic construct
  source 1..50: mol_type = other DNA
acgctctgaaatgtataatctatgtgataagattataccattgaaaggaa

SEQ ID NO: 53498 - DNA, 50 bp, synthetic construct
  source 1..50: mol_type = other DNA
tttttattgctaaatacaaaatgttaatatatcgtttagagggatatata

SEQ ID NO: 53499 - DNA, 50 bp, synthetic construct
  source 1..50: mol_type = other DNA
gaatggggaatatatttagctgaaacatcaaacagtcatatctcaaattc

SEQ ID NO: 53500 - DNA, 50 bp, synthetic construct
  source 1..50: mol_type = other DNA
atagtatcactccctcataaaaatatattgtagtgaggtggttcaatggc

SEQ ID NO: 53501 - DNA, 50 bp, synthetic construct
  source 1..50: mol_type = other DNA
tatactactaaaatgaacctaccgaccggaggggttcagttagtagcata

SEQ ID NO: 53502 - DNA, 50 bp, synthetic construct
  source 1..50: mol_type = other DNA
tttctttttgccataccttgagtgtccagaaaaaaaccaagaaaaataaa

SEQ ID NO: 53503 - DNA, 50 bp, synthetic construct
  source 1..50: mol_type = other DNA
acctttctatttttttcctaaaaaagataacaggaagaacaaagaaaact

SEQ ID NO: 53504 - DNA, 50 bp, synthetic construct
  source 1..50: mol_type = other DNA
aatggcgcgttttgtgacaacctagatagcatggttaaaacgacgccaca

SEQ ID NO: 53505 - DNA, 50 bp, synthetic construct
  source 1..50: mol_type = other DNA
ggaattgggagtaaatgccattgaacaaaatcaccgttttccccaatcgc

SEQ ID NO: 53506 - DNA, 50 bp, synthetic construct
  source 1..50: mol_type = other DNA
ccacggcagaggccgtttgttgcacagctcaccgacgcaggctgcccgga

SEQ ID NO: 53507 - DNA, 50 bp, synthetic construct
  source 1..50: mol_type = other DNA
tttccacaccgatcacctgcttcacggaaaggaggtacttcccttgaaaa

SEQ ID NO: 53508 - DNA, 50 bp, synthetic construct
  source 1..50: mol_type = other DNA
atgcttgtttgctttacctccaacatgctggaaaatcagaaaaaaaacgg

SEQ ID NO: 53509 - DNA, 50 bp, synthetic construct
  source 1..50: mol_type = other DNA
gcttgttggggttcacagaaaacttcaccagacgcttaaccagtacaaag

SEQ ID NO: 53510 - DNA, 50 bp, synthetic construct
  source 1..50: mol_type = other DNA
caataagggctgtttatgctataatattatagcatatcacacccggatac

SEQ ID NO: 53511 - DNA, 50 bp, synthetic construct
  source 1..50: mol_type = other DNA
tatccacagaatctgtaccaacaattctgtatccgtatgggatgtggttt

SEQ ID NO: 53512 - DNA, 50 bp, synthetic construct
  source 1..50: mol_type = other DNA
cagaaaggattgatgattagatgggctcattgccgccagcacattttctg

SEQ ID NO: 53513 - DNA, 50 bp, synthetic construct
  source 1..50: mol_type = other DNA
aacgaaagccggatggaaccctgtatacatttgcgcatataggcttatgg

SEQ ID NO: 53514 - DNA, 50 bp, synthetic construct
  source 1..50: mol_type = other DNA
aaataaaagctgatatgccgaatagagacacctggcaataggtgttattt

SEQ ID NO: 53515 - DNA, 50 bp, synthetic construct
  source 1..50: mol_type = other DNA
ataaggttagccttgcctaagaaggacggtccagcagccacgcacctgac

SEQ ID NO: 53516 - DNA, 50 bp, synthetic construct
  source 1..50: mol_type = other DNA
agtttaccttctgattttctcatctttgtaagaaaatccactgtgaaagt

SEQ ID NO: 53517 - DNA, 50 bp, synthetic construct
  source 1..50: mol_type = other DNA
tcacctcactttctgctattacatatacgtgctaaaaaaaatttaaatct

SEQ ID NO: 53518 - DNA, 50 bp, synthetic construct
  source 1..50: mol_type = other DNA
cctttcaagggctttctgacgggcggcagactctgactctgtttgtctgg

SEQ ID NO: 53519 - DNA, 50 bp, synthetic construct
  source 1..50: mol_type = other DNA
agatttgcccatctctgactgccatgcgtcagtgggtttatggttgcggg

SEQ ID NO: 53520 - DNA, 50 bp, synthetic construct
  source 1..50: mol_type = other DNA
ggactggataacagctgcccaaaaaagggaaagaatttgtaaaacagtcc

SEQ ID NO: 53521 - DNA, 50 bp, synthetic construct
  source 1..50: mol_type = other DNA
gcgacgctgtcacgcttcacggcggccctgatgaaagaggacagcaagct

SEQ ID NO: 53522 - DNA, 50 bp, synthetic construct
  source 1..50: mol_type = other DNA
ctctgcttcttcgatttttttactaaagcaaaaaaatccatgaaggccgc

SEQ ID NO: 53523 - DNA, 50 bp, synthetic construct
  source 1..50: mol_type = other DNA
gggtttctacagatcaggaagaacagcttgagctaaatcagtttgagtat

SEQ ID NO: 53524 - DNA, 50 bp, synthetic construct
  source 1..50: mol_type = other DNA
atcctatgattattctccgacagacagcttcgtggtggagatcataatgt

SEQ ID NO: 53525 - DNA, 50 bp, synthetic construct
  source 1..50: mol_type = other DNA
gttatggtccttatgtatagccccatcataaaataaaatggaggtataat

SEQ ID NO: 53526 - DNA, 50 bp, synthetic construct
  source 1..50: mol_type = other DNA
ttatgtacgcattcttccgttccgatatcaagcatagaaaaatgacctca

SEQ ID NO: 53527 - DNA, 50 bp, synthetic construct
  source 1..50: mol_type = other DNA
tattaacctatggatatacagttaaaaaatgttgtatcttcagaaatcta

SEQ ID NO: 53528 - DNA, 50 bp, synthetic construct
  source 1..50: mol_type = other DNA
ttaaaaaatgcatatattaaaagtaaactgctattttatgcggttttttg

SEQ ID NO: 53529 - DNA, 50 bp, synthetic construct
  source 1..50: mol_type = other DNA
ggtgacacccacggcggcttccagcgctccacgatgcccgcaccgtcaaa

SEQ ID NO: 53530 - DNA, 50 bp, synthetic construct
  source 1..50: mol_type = other DNA
gttacgttcttactgacttccatctatatttaagaaatccagaacgattt

SEQ ID NO: 53531 - DNA, 50 bp, synthetic construct
  source 1..50: mol_type = other DNA
tgtcagtgtgacatattacctctgaaggagataattatgttttaaatgca

SEQ ID NO: 53532 - DNA, 50 bp, synthetic construct
  source 1..50: mol_type = other DNA
aagctgcgcggatcagatcgcggatctccctcttctgtactgaccagctt

SEQ ID NO: 53533 - DNA, 50 bp, synthetic construct
  source 1..50: mol_type = other DNA
accacacaacaactatccaatctcacatgcaaatatagttgctattaata

SEQ ID NO: 53534 - DNA, 50 bp, synthetic construct
  source 1..50: mol_type = other DNA
ccgctgctggcatcggttgccaaacttcttagaatttcatagagttccgc

SEQ ID NO: 53535 - DNA, 50 bp, synthetic construct
  source 1..50: mol_type = other DNA
tgggaaaacccgtttttaaactaaattgttgatatagccagtgtaataat

SEQ ID NO: 53536 - DNA, 50 bp, synthetic construct
  source 1..50: mol_type = other DNA
aataagctattgccttattttaaacagccaaaatatggcagagttcattc

SEQ ID NO: 53537 - DNA, 50 bp, synthetic construct
  source 1..50: mol_type = other DNA
tgatgatatttcaaatggagagaccttactcttacttctcaatatccaca

SEQ ID NO: 53538 - DNA, 50 bp, synthetic construct
  source 1..50: mol_type = other DNA
agtctttcggtacttcttttgaaaatacggaaaataagtattgaaaatag

SEQ ID NO: 53539 - DNA, 50 bp, synthetic construct
  source 1..50: mol_type = other DNA
tagaatatatgtaatatctgtttgacagtaggattattacattttttagt

SEQ ID NO: 53540 - DNA, 50 bp, synthetic construct
  source 1..50: mol_type = other DNA
ggcaggtgcttttttcatgcgtcaaaatgaaaaagaaaaaagcatatgta

SEQ ID NO: 53541 - DNA, 50 bp, synthetic construct
  source 1..50: mol_type = other DNA
gacacctccatctacattttatgttcacaagccctgccagtggatttttc

SEQ ID NO: 53542 - DNA, 50 bp, synthetic construct
  source 1..50: mol_type = other DNA
tctgcctgtttgacgggattgtcataagccactcgatactaagaggcaga

SEQ ID NO: 53543 - DNA, 50 bp, synthetic construct
  source 1..50: mol_type = other DNA
ggataattgcattgatgatagccaatggtgtatggcccatctaatcatca

SEQ ID NO: 53544 - DNA, 50 bp, synthetic construct
  source 1..50: mol_type = other DNA
agcaagtgccagaaatgatacaatatcttgtaaagactctggcgaagctg

SEQ ID NO: 53545 - DNA, 50 bp, synthetic construct
  source 1..50: mol_type = other DNA
acttttatccgtcgcattcttgtaaagacaaaaatactcacacgaaaagg

SEQ ID NO: 53546 - DNA, 50 bp, synthetic construct
  source 1..50: mol_type = other DNA
ggaaaatctgacttttaactattcataattaagttccagccagatagtag

SEQ ID NO: 53547 - DNA, 50 bp, synthetic construct
  source 1..50: mol_type = other DNA
aaatggcttattaaagtgcgccattaaagggattcagagctaatatgtga

SEQ ID NO: 53548 - DNA, 50 bp, synthetic construct
  source 1..50: mol_type = other DNA
cttatccaactttgttggaatattataatgggaaatgtaatgctgattcc

SEQ ID NO: 53549 - DNA, 50 bp, synthetic construct
  source 1..50: mol_type = other DNA
ataattccctctaaaaaagggtataattaccattgagtggaaagatcatt

SEQ ID NO: 53550 - DNA, 50 bp, synthetic construct
  source 1..50: mol_type = other DNA
gcttttgttttattaacaattcccattttatttcttatctggaagaaaaa

SEQ ID NO: 53551 - DNA, 50 bp, synthetic construct
  source 1..50: mol_type = other DNA
taaagacttatagattgaatttacaagattgagtgatatattagtcaagt

SEQ ID NO: 53552 - DNA, 50 bp, synthetic construct
  source 1..50: mol_type = other DNA
cacctcggtttaaaatatgtaaaaattttttgcgtttttagtataaacag

SEQ ID NO: 53553 - DNA, 50 bp, synthetic construct
  source 1..50: mol_type = other DNA
gcgcttcgtgttgttcttgtaataattataacacataaaggagaaaaaat

SEQ ID NO: 53554 - DNA, 50 bp, synthetic construct
  source 1..50: mol_type = other DNA
gggattttaagtcccttgcgtctgccaaaaccaaaggcgattaaaatcgc

SEQ ID NO: 53555 - DNA, 50 bp, synthetic construct
  source 1..50: mol_type = other DNA
taaatatctttcacaggcaaaatattggctttcagagtgatatatagact

SEQ ID NO: 53556 - DNA, 50 bp, synthetic construct
  source 1..50: mol_type = other DNA
tttgttgctggtaaatatctttcacaaaaaagatatttatattcagagaa

SEQ ID NO: 53557 - DNA, 50 bp, synthetic construct
  source 1..50: mol_type = other DNA
aaaaaaaataaataacacacccaaaattttagaaagaaggtattttttta

SEQ ID NO: 53558 - DNA, 50 bp, synthetic construct
  source 1..50: mol_type = other DNA
ccagcgcctggtgttttaataaaaaaatatctttaaagaacaggaactga

SEQ ID NO: 53559 - DNA, 50 bp, synthetic construct
  source 1..50: mol_type = other DNA
cgtccagctctcagagcgagaacgatagttccgtatctgagattgtacgg

SEQ ID NO: 53560 - DNA, 50 bp, synthetic construct
  source 1..50: mol_type = other DNA
ctaatatggataccaaacatctcgcatgaaatcttctatgtcctgatccg

SEQ ID NO: 53561 - DNA, 50 bp, synthetic construct
  source 1..50: mol_type = other DNA
aggaaaattgatatggcaagacaaatacgccaggtggacacggttttcct

SEQ ID NO: 53562 - DNA, 50 bp, synthetic construct
  source 1..50: mol_type = other DNA
gtatggggctttctgcgagagcgtatgaattgtcggacgaatgtccgtac

SEQ ID NO: 53563 - DNA, 50 bp, synthetic construct
  source 1..50: mol_type = other DNA
ttcctttttgattatttttaatcgtaatattaaaaactctttttctggaa

SEQ ID NO: 53564 - DNA, 50 bp, synthetic construct
  source 1..50: mol_type = other DNA
ttaacttaaatggtataaatcgctcagcatatttagagaattgtcaataa

SEQ ID NO: 53565 - DNA, 50 bp, synthetic construct
  source 1..50: mol_type = other DNA
tttctcgatcatttcgagaaagtgctgctgttctgttcattcctttttcc

SEQ ID NO: 53566 - DNA, 50 bp, synthetic construct
  source 1..50: mol_type = other DNA
aaggtttccgtatgatcattcggaaattttaatgatcgaactgatgcgtg

SEQ ID NO: 53567 - DNA, 50 bp, synthetic construct
  source 1..50: mol_type = other DNA
taaagaattgtttactgtcattgacaatattatcgcaaattaaatcttta

SEQ ID NO: 53568 - DNA, 50 bp, synthetic construct
  source 1..50: mol_type = other DNA
tgacctttgccagaacaactttgccggaaaagttacgaaacggcacaaaa

SEQ ID NO: 53569 - DNA, 50 bp, synthetic construct
  source 1..50: mol_type = other DNA
aggttcgcccaacgctgactgccgtgcgtcagtgggtttatggttgcagg

SEQ ID NO: 53570 - DNA, 50 bp, synthetic construct
  source 1..50: mol_type = other DNA
aaaagcgcgcacagcaaacgcacaattgtgcgttttgccctcaacctaaa

SEQ ID NO: 53571 - DNA, 50 bp, synthetic construct
  source 1..50: mol_type = other DNA
taaattggaaagcagaatcacaatctggcaggaacaacgtttcctattta

SEQ ID NO: 53572 - DNA, 50 bp, synthetic construct
  source 1..50: mol_type = other DNA
caacatacactaccacatagtcctttgacatgatgcactctcttatgtcc

SEQ ID NO: 53573 - DNA, 50 bp, synthetic construct
  source 1..50: mol_type = other DNA
tcgcgcttgagcagcttctcgcccgcgggaggtcagccgttgaagcgcgg

SEQ ID NO: 53574 - DNA, 50 bp, synthetic construct
  source 1..50: mol_type = other DNA
ctaaatgaggcaacatttgatttaaaaggaacaaatgttctataattatt

SEQ ID NO: 53575 - DNA, 50 bp, synthetic construct
  source 1..50: mol_type = other DNA
gccacaaaagtaattgccaaaaatattctttcctggacagttagaattat

SEQ ID NO: 53576 - DNA, 50 bp, synthetic construct
  source 1..50: mol_type = other DNA
aactgtccgctttggcaaaatctcctcaaaaagaatggtacaggccagtt

SEQ ID NO: 53577 - DNA, 50 bp, synthetic construct
  source 1..50: mol_type = other DNA
gataggcccgttctggacggggctgaatcagcgtttcccagggaaggaga

SEQ ID NO: 53578 - DNA, 50 bp, synthetic construct
  source 1..50: mol_type = other DNA
caaaaaagttgtgtaatttaataaagaaaggtgaaaggtatcgcagattg

SEQ ID NO: 53579 - DNA, 50 bp, synthetic construct
  source 1..50: mol_type = other DNA
tttaaccaaaattggaaccctgagaagtcagaatgccgataaaatataaa

SEQ ID NO: 53580 - DNA, 50 bp, synthetic construct
  source 1..50: mol_type = other DNA
gtataaagcggctctaagcataaaaatttgcgccctgagccgcagtattt

SEQ ID NO: 53581 - DNA, 50 bp, synthetic construct
  source 1..50: mol_type = other DNA
gattgcctctgaatgtgatgtgttgttacctatcaacccgagggccaata

SEQ ID NO: 53582 - DNA, 50 bp, synthetic construct
  source 1..50: mol_type = other DNA
cacccaaacagggtgcttttcttatgcgcgaaaagccccggccttctcca

SEQ ID NO: 53583 - DNA, 50 bp, synthetic construct
  source 1..50: mol_type = other DNA
gcagcgaaatgccgtgtgagtttctggacgctctcagggcattgtataat

SEQ ID NO: 53584 - DNA, 50 bp, synthetic construct
  source 1..50: mol_type = other DNA
ctgggtacaaaggtaagcattttatttaatttgattacttttgtggtgaa

SEQ ID NO: 53585 - DNA, 50 bp, synthetic construct
  source 1..50: mol_type = other DNA
gcagcatcttacctgctggcggttattacggctctaatcccagatcgtaa

SEQ ID NO: 53586 - DNA, 50 bp, synthetic construct
  source 1..50: mol_type = other DNA
aggattgtcctccttccccagatcattccttcctcgcctgcctcttcgtt

SEQ ID NO: 53587 - DNA, 50 bp, synthetic construct
  source 1..50: mol_type = other DNA
cgaagagcagcatcgcgaagagacgggcctcttcactatcaggatgcccc

SEQ ID NO: 53588 - DNA, 50 bp, synthetic construct
  source 1..50: mol_type = other DNA
gctcgtctcggagctcttgcagtaaagaccgctcccgctccgaaagttgg

SEQ ID NO: 53589 - DNA, 50 bp, synthetic construct
  source 1..50: mol_type = other DNA
ctcgcctcatcatcccctttctttatctgcaaagattatgaaaagccgaa

SEQ ID NO: 53590 - DNA, 50 bp, synthetic construct
  source 1..50: mol_type = other DNA
cgccattccggcatagaatcgaagtcaaggagttttgagcatgaatgcag

SEQ ID NO: 53591 - DNA, 50 bp, synthetic construct
  source 1..50: mol_type = other DNA
gaatacaccggagcagaaaccggtgaaccagttgagtctcagttgttttc

SEQ ID NO: 53592 - DNA, 50 bp, synthetic construct
  source 1..50: mol_type = other DNA
gcatcaaccacaccgggtgctgttgcaactttccttttatgctttgatgc

SEQ ID NO: 53593 - DNA, 50 bp, synthetic construct
  source 1..50: mol_type = other DNA
acgagagttttagtatccttgattgaaatgaaggttactaaaattcttta

SEQ ID NO: 53594 - DNA, 50 bp, synthetic construct
  source 1..50: mol_type = other DNA
tttctcctttctatgtgctggactcgactttatcaaagagatagacaaag

SEQ ID NO: 53595 - DNA, 50 bp, synthetic construct
  source 1..50: mol_type = other DNA
agcatacagtacaaatcgaaggttgattttattagctttttgccgctatc

SEQ ID NO: 53596 - DNA, 50 bp, synthetic construct
  source 1..50: mol_type = other DNA
gatagtctgatacaaaattcgcgcttttgcgatatttgtatgtagaaaaa

SEQ ID NO: 53597 - DNA, 50 bp, synthetic construct
  source 1..50: mol_type = other DNA
tatctatcatggtggatataatgagctgtacacatcacaaatggcagtgt

SEQ ID NO: 53598 - DNA, 50 bp, synthetic construct
  source 1..50: mol_type = other DNA
ccaaaactgcgctacacccggatatcctgcatcgtgctgcgctgcttgag

SEQ ID NO: 53599 - DNA, 50 bp, synthetic construct
  source 1..50: mol_type = other DNA
cataaatacatccagcctcaggataaaaaatgaggagggctgtgattatg

SEQ ID NO: 53600 - DNA, 50 bp, synthetic construct
  source 1..50: mol_type = other DNA
ccagcctaccgactaaagtaagctggagcagagcttatgcggtgtgctgg

SEQ ID NO: 53601 - DNA, 50 bp, synthetic construct
  source 1..50: mol_type = other DNA
taatggcaacggcgacaagaagagtaccgcccttctcgccgttgaacacg

SEQ ID NO: 53602 - DNA, 50 bp, synthetic construct
  source 1..50: mol_type = other DNA
ttttcgcataaaagctattctttccggaaacaaagtcgggtggaacaaaa

SEQ ID NO: 53603 - DNA, 50 bp, synthetic construct
  source 1..50: mol_type = other DNA
tataatgggcataaagtatttattttgatttctgcattatgaaaatgcct

SEQ ID NO: 53604 - DNA, 50 bp, synthetic construct
  source 1..50: mol_type = other DNA
acctatctgagtagtttcgctcatatatttgttaaactaatcaagtatca

SEQ ID NO: 53605 - DNA, 50 bp, synthetic construct
  source 1..50: mol_type = other DNA
agatatgtaaattttgatttctacaactatgaataaaataatacataaaa

SEQ ID NO: 53606 - DNA, 50 bp, synthetic construct
  source 1..50: mol_type = other DNA
ttcatttttgtgtttattattttttacagaagaagaaagaaaaaaatgta

SEQ ID NO: 53607 - DNA, 50 bp, synthetic construct
  source 1..50: mol_type = other DNA
atttcaacgtgcgaaaggaatcttcaaatgacttgataaaaaccgagaaa

SEQ ID NO: 53608 - DNA, 50 bp, synthetic construct
  source 1..50: mol_type = other DNA
gcttcttcacaaaaattttgtaaaagatatcgatgatattgttaagatcg

SEQ ID NO: 53609 - DNA, 50 bp, synthetic construct
  source 1..50: mol_type = other DNA
tgccaaaactggtaaaggcggcagcgctaataaccctggctattcgggca

SEQ ID NO: 53610 - DNA, 50 bp, synthetic construct
  source 1..50: mol_type = other DNA
cgcatcggaggccatgaccagcaactctgctggccgtcacctccgccgag

SEQ ID NO: 53611 - DNA, 50 bp, synthetic construct
  source 1..50: mol_type = other DNA
gagcgcgaatctgcccgctttgaaatttcaattcggcgttcgcggcgtga

SEQ ID NO: 53612 - DNA, 50 bp, synthetic construct
  source 1..50: mol_type = other DNA
tcatggattctctggctttttctcgccgcaaggagcctgaagttccattt

SEQ ID NO: 53613 - DNA, 50 bp, synthetic construct
  source 1..50: mol_type = other DNA
gttttctgataataatgtacccaaatatggctataaactgttccttctgg

SEQ ID NO: 53614 - DNA, 50 bp, synthetic construct
  source 1..50: mol_type = other DNA
gtcaggatatttctccaccatataggtatcacatagttaaagatattggt

SEQ ID NO: 53615 - DNA, 50 bp, synthetic construct
  source 1..50: mol_type = other DNA
gtgataccaccgtccatcaaccccatgctcaagcgggacggcaaaatcgt

SEQ ID NO: 53616 - DNA, 50 bp, synthetic construct
  source 1..50: mol_type = other DNA
tctaaatatgctgtataatcggtatatacactcacaacaaaacaaacgga

SEQ ID NO: 53617 - DNA, 50 bp, synthetic construct
  source 1..50: mol_type = other DNA
tatagcatattttctgaaaaaagtcaaagttttctttaagatatactatg

SEQ ID NO: 53618 - DNA, 50 bp, synthetic construct
  source 1..50: mol_type = other DNA
ctcccctgcctgctctgggaatcgtgttgccaccagagaagcgccgcctt

SEQ ID NO: 53619 - DNA, 50 bp, synthetic construct
  source 1..50: mol_type = other DNA
tttccatattctttagttttttgtattaaatgatttaaagaaaatacgaa

SEQ ID NO: 53620 - DNA, 50 bp, synthetic construct
  source 1..50: mol_type = other DNA
tcgttttctttgctggaataactgtacaattcgattagcaaagacagtaa

SEQ ID NO: 53621 - DNA, 50 bp, synthetic construct
  source 1..50: mol_type = other DNA
actcattcaagcactttctacttgaaaaagtaataaaaaactcaaaagca

SEQ ID NO: 53622 - DNA, 50 bp, synthetic construct
  source 1..50: mol_type = other DNA
tagtcgtcgttgtaggaccagtaacattatgtgtcctccagagaatttaa

SEQ ID NO: 53623 - DNA, 50 bp, synthetic construct
  source 1..50: mol_type = other DNA
cattttcagagtccttaacaagatattagttgcggagattccttcatctg

SEQ ID NO: 53624 - DNA, 50 bp, synthetic construct
  source 1..50: mol_type = other DNA
gctttcgagcaattccaatgcagcgatttgcatgaaaaaatttccaatcg

SEQ ID NO: 53625 - DNA, 50 bp, synthetic construct
  source 1..50: mol_type = other DNA
ggccaaatttatcaagtattcagcccaacgaatatttggaatgactggaa

SEQ ID NO: 53626 - DNA, 50 bp, synthetic construct
  source 1..50: mol_type = other DNA
gtagaaaatagccatgaagcaataattatttctcaagaaatattcaataa

SEQ ID NO: 53627 - DNA, 50 bp, synthetic construct
  source 1..50: mol_type = other DNA
agttatgagaatcaggtcaattattaataattttgaggattctcaagaga

SEQ ID NO: 53628 - DNA, 50 bp, synthetic construct
  source 1..50: mol_type = other DNA
atgatgatagtgggcaactattgtggaagagtattctactttatttccaa

SEQ ID NO: 53629 - DNA, 50 bp, synthetic construct
  source 1..50: mol_type = other DNA
ccgcgccctcgccaaccgcgccctcgattgggcggctgcatacggcgcta

SEQ ID NO: 53630 - DNA, 50 bp, synthetic construct
  source 1..50: mol_type = other DNA
agacatctatgcagatgaaggaatcttatatctcaactgaaaaactgtat

SEQ ID NO: 53631 - DNA, 50 bp, synthetic construct
  source 1..50: mol_type = other DNA
tttaattctctggaggacgcataatgttactggtcctacaacgacgacta

SEQ ID NO: 53632 - DNA, 50 bp, synthetic construct
  source 1..50: mol_type = other DNA
gacttcccgccggatccggactgtaatcagggtgtcccgggttcgaatcc

SEQ ID NO: 53633 - DNA, 50 bp, synthetic construct
  source 1..50: mol_type = other DNA
tgtggaaacatgtccaatggttgaatctttaccttgatgagatttccaca

SEQ ID NO: 53634 - DNA, 50 bp, synthetic construct
  source 1..50: mol_type = other DNA
acattattttttttcatactgaaatttttcagaatctgaaatacctattc

SEQ ID NO: 53635 - DNA, 50 bp, synthetic construct
  source 1..50: mol_type = other DNA
tccatccgtttgctgcgggaaggtatatatagactaccaaaacggaagga

SEQ ID NO: 53636 - DNA, 50 bp, synthetic construct
  source 1..50: mol_type = other DNA
gggaaaccgaggcggagcttactttcgtgtagtttataccgcgggattga

SEQ ID NO: 53637 - DNA, 50 bp, synthetic construct
  source 1..50: mol_type = other DNA
tttccgtaaggctttgacagtcgaattctgtaactacagccttataaatt

SEQ ID NO: 53638 - DNA, 50 bp, synthetic construct
  source 1..50: mol_type = other DNA
catgaatcaagttctcgaccgcatcaggggcgctgattacttgactaata

SEQ ID NO: 53639 - DNA, 50 bp, synthetic construct
  source 1..50: mol_type = other DNA
agtgataaaattaatttagtaataatgattcgtatttggctttttacact

SEQ ID NO: 53640 - DNA, 50 bp, synthetic construct
  source 1..50: mol_type = other DNA
gttcttcatctctgagtgcgtcgagctgccgcctggcacagatgaagtag

SEQ ID NO: 53641 - DNA, 50 bp, synthetic construct
  source 1..50: mol_type = other DNA
gagttactaacagaatacgatacgaaggtaacctaaaaaaggagtaaaag

SEQ ID NO: 53642 - DNA, 50 bp, synthetic construct
  source 1..50: mol_type = other DNA
agattttgttcaagctgttgccttttaaactgtacttttggaaaagagag

SEQ ID NO: 53643 - DNA, 50 bp, synthetic construct
  source 1..50: mol_type = other DNA
taaaatgcgatttaaatgacattttaaaattgtatcagagacggctttta

SEQ ID NO: 53644 - DNA, 50 bp, synthetic construct
  source 1..50: mol_type = other DNA
tgttgtactaattgaacactacccgtgggctgtgttaagttagtacaaaa

SEQ ID NO: 53645 - DNA, 50 bp, synthetic construct
  source 1..50: mol_type = other DNA
ccattgtagataaagaaacgtttgatcaaccatttattagcagattatcg

SEQ ID NO: 53646 - DNA, 50 bp, synthetic construct
  source 1..50: mol_type = other DNA
agtattatgtagaaaataaccatgaagaaggttatttatgactcatcagt

SEQ ID NO: 53647 - DNA, 50 bp, synthetic construct
  source 1..50: mol_type = other DNA
cgctggaccccgggtaatttggaccttcctgtcttcatgggcgtggcccc

SEQ ID NO: 53648 - DNA, 50 bp, synthetic construct
  source 1..50: mol_type = other DNA
atcagcgcaccaccgccggggtgcctccacccaggtcagggtgtcctgcc

SEQ ID NO: 53649 - DNA, 50 bp, synthetic construct
  source 1..50: mol_type = other DNA
tatcagaactattctgcattttatttttacaataaattctgcatctgata

SEQ ID NO: 53650 - DNA, 50 bp, synthetic construct
  source 1..50: mol_type = other DNA
tggagaactagcctttctattgttatggttatatgtattggatttctaag

SEQ ID NO: 53651 - DNA, 50 bp, synthetic construct
  source 1..50: mol_type = other DNA
gcttttgttctgacaagtttcgcaattggcccacttcggcaaaggtcata

SEQ ID NO: 53652 - DNA, 50 bp, synthetic construct
  source 1..50: mol_type = other DNA
gccgtttttggacggtatcgaacagttctttataaaaaagaaatcccgtc

SEQ ID NO: 53653 - DNA, 50 bp, synthetic construct
  source 1..50: mol_type = other DNA
tccgtccgtgtgagcacgaggcggtcctcatccgtggaaacacgcgcata

SEQ ID NO: 53654 - DNA, 50 bp, synthetic construct
  source 1..50: mol_type = other DNA
gaaagtactttttatcaaaaattttaaaattatttatattttccacttga

SEQ ID NO: 53655 - DNA, 50 bp, synthetic construct
  source 1..50: mol_type = other DNA
ccttgtttttttatttcttgaactttatttaaatttcttaaaactatttt

SEQ ID NO: 53656 - DNA, 50 bp, synthetic construct
  source 1..50: mol_type = other DNA
tgagagatttaggttatctgatataaataacagaaccccttttagtatta

SEQ ID NO: 53657 - DNA, 50 bp, synthetic construct
  source 1..50: mol_type = other DNA
aactgaaccagcctgctcagttgcaccctgttcagcaggcagaatatatg

SEQ ID NO: 53658 - DNA, 50 bp, synthetic construct
  source 1..50: mol_type = other DNA
atattgtttccttttcttaaaatgttataattatagaaaagaaaaaaagt

SEQ ID NO: 53659 - DNA, 50 bp, synthetic construct
  source 1..50: mol_type = other DNA
aatcatgagccaatcttagatagagaaaaaggtcaaggtagccgcttatt

SEQ ID NO: 53660 - DNA, 50 bp, synthetic construct
  source 1..50: mol_type = other DNA
tggcatcaatagtttgagctattttaatcctgcgtcgcttattgaattgg

SEQ ID NO: 53661 - DNA, 50 bp, synthetic construct
  source 1..50: mol_type = other DNA
gattccgttagaaccccggccggtctgatgatttccgttctttcggctgt

SEQ ID NO: 53662 - DNA, 50 bp, synthetic construct
  source 1..50: mol_type = other DNA
tacagatcaggaagaacagttgaacagcaaatacgtctttgacatctttg

SEQ ID NO: 53663 - DNA, 50 bp, synthetic construct
  source 1..50: mol_type = other DNA
tgcttttgtggcttgctggtaatatatattatgggaaaggaagataaaaa

SEQ ID NO: 53664 - DNA, 50 bp, synthetic construct
  source 1..50: mol_type = other DNA
gttttagtttttttactcttatctaggttcaagaaataaaaaaacaaggt

SEQ ID NO: 53665 - DNA, 50 bp, synthetic construct
  source 1..50: mol_type = other DNA
gttgttatcatagtagtacctctttcaagacctagctcaatccctacaaa

SEQ ID NO: 53666 - DNA, 50 bp, synthetic construct
  source 1..50: mol_type = other DNA
gtagaaaatagccatgaagcaataattatttctcaggaaatattcaataa

SEQ ID NO: 53667 - DNA, 50 bp, synthetic construct
  source 1..50: mol_type = other DNA
gtgaagtcgtagcctaatgctgtgaccaaagcgttctctgacgttgtcaa

SEQ ID NO: 53668 - DNA, 50 bp, synthetic construct
  source 1..50: mol_type = other DNA
tataatgtccttttatccggcgatataaagctttataaatataccggata

SEQ ID NO: 53669 - DNA, 50 bp, synthetic construct
  source 1..50: mol_type = other DNA
attccaaatattcgttggggggatgaatgagtgagctgaatacttgataa

SEQ ID NO: 53670 - DNA, 50 bp, synthetic construct
  source 1..50: mol_type = other DNA
attagtgtagcaattgaattaaccatgcatatgatctttatgcaaaatat

SEQ ID NO: 53671 - DNA, 50 bp, synthetic construct
  source 1..50: mol_type = other DNA
agcaaaagattttatttgctgggcacgctcaatcgataatatctttgatg

SEQ ID NO: 53672 - DNA, 50 bp, synthetic construct
  source 1..50: mol_type = other DNA
gccgctgtggatcgagccggaaaagcccgcaggcgttgaaaacctgcggg

SEQ ID NO: 53673 - DNA, 50 bp, synthetic construct
  source 1..50: mol_type = other DNA
ataggaagccacgcggaaaagaaagctttcttttcattcaccccattgct

SEQ ID NO: 53674 - DNA, 50 bp, synthetic construct
  source 1..50: mol_type = other DNA
gaaaccgccgcttgattgaccatttgcttgactaatcggcggtgtagagt

SEQ ID NO: 53675 - DNA, 50 bp, synthetic construct
  source 1..50: mol_type = other DNA
cagacaactctaatttccctttcagtatgaagatgaatatgggatgcggc

SEQ ID NO: 53676 - DNA, 50 bp, synthetic construct
  source 1..50: mol_type = other DNA
aaacttaactttctataacgaggaaaaaaaggctataaccacaatagttg

SEQ ID NO: 53677 - DNA, 50 bp, synthetic construct
  source 1..50: mol_type = other DNA
tgaagaactacgtggtgtgcttgctattagttgctgaaataccttcatct

SEQ ID NO: 53678 - DNA, 50 bp, synthetic construct
  source 1..50: mol_type = other DNA
gtcgtggtattgtctttcgatggctctaatttatttttaaaatcatctct

SEQ ID NO: 53679 - DNA, 50 bp, synthetic construct
  source 1..50: mol_type = other DNA
attatatcatatatccctagaaatttatttctcaagaaatattcaataag

SEQ ID NO: 53680 - DNA, 50 bp, synthetic construct
  source 1..50: mol_type = other DNA
aagttgtaaatattgaaaaaactgattgtatttttttataaaatataatg

SEQ ID NO: 53681 - DNA, 50 bp, synthetic construct
  source 1..50: mol_type = other DNA
tgtaattattttgtaatctttgcgcaaacaaattcaacagaatcttttgt

SEQ ID NO: 53682 - DNA, 50 bp, synthetic construct
  source 1..50: mol_type = other DNA
ttatttttcttgaatattatgttatctctcatagtaaaaaagaaaaatca

SEQ ID NO: 53683 - DNA, 50 bp, synthetic construct
  source 1..50: mol_type = other DNA
attttttcttttttactatgagagattattcaatgaaaaaaaatactaaa

SEQ ID NO: 53684 - DNA, 50 bp, synthetic construct
  source 1..50: mol_type = other DNA
taaaaagcaactgaaaaatgacagatggatcttctgtcagtttcatttct

SEQ ID NO: 53685 - DNA, 50 bp, synthetic construct
  source 1..50: mol_type = other DNA
aaattactgccatttttgtgtgttaaaacacataaagatggtaataatta

SEQ ID NO: 53686 - DNA, 50 bp, synthetic construct
  source 1..50: mol_type = other DNA
catttattttcagataagcaaaaagcggataattcccctgacaataaaaa

SEQ ID NO: 53687 - DNA, 50 bp, synthetic construct
  source 1..50: mol_type = other DNA
ccaaattcgacacaatataatgataggagattatcttgatccgtcatcat

SEQ ID NO: 53688 - DNA, 50 bp, synthetic construct
  source 1..50: mol_type = other DNA
aatgaaacatactctaatcattattttcttcgtataatttattttttgtg

SEQ ID NO: 53689 - DNA, 50 bp, synthetic construct
  source 1..50: mol_type = other DNA
tgatgccctcgatctgttctgaaaagaagtgccggagattgtgaaagttg

SEQ ID NO: 53690 - DNA, 50 bp, synthetic construct
  source 1..50: mol_type = other DNA
tcttcttttgttttttccaactgttctatttttatgcctaaaacagaaga

SEQ ID NO: 53691 - DNA, 50 bp, synthetic construct
  source 1..50: mol_type = other DNA
ggacgcgtccgcggccttggccggcggcgaccgcgaccgcggccgccacc

SEQ ID NO: 53692 - DNA, 50 bp, synthetic construct
  source 1..50: mol_type = other DNA
cacctccatattttgatacatgggcataaaacttacaaaatagggaggct

SEQ ID NO: 53693 - DNA, 50 bp, synthetic construct
  source 1..50: mol_type = other DNA
catttcttttcgctccttattttcttgaaaataatgtataagttaaatca

SEQ ID NO: 53694 - DNA, 50 bp, synthetic construct
  source 1..50: mol_type = other DNA
atccctccttccggtagtgtctatatatcacgcgcctttcgccgttctgc

SEQ ID NO: 53695 - DNA, 50 bp, synthetic construct
  source 1..50: mol_type = other DNA
cggcctatgcccgcgtctccacctcccggtggagaccggcgtcttttccg

SEQ ID NO: 53696 - DNA, 50 bp, synthetic construct
  source 1..50: mol_type = other DNA
ggctttgctgtttttttactggaaatatccagggcaaaaagctggacgcc

SEQ ID NO: 53697 - DNA, 50 bp, synthetic construct
  source 1..50: mol_type = other DNA
ccatgagattgcaaaaaggctgaatgacttgctatttgtaggctttagag

SEQ ID NO: 53698 - DNA, 50 bp, synthetic construct
  source 1..50: mol_type = other DNA
tgccacgtttaaactgcacatgctcgagcagctggcacgagcacgcggac

SEQ ID NO: 53699 - DNA, 50 bp, synthetic construct
  source 1..50: mol_type = other DNA
atttcttatccccctttcatagcatatactccggcttggacagaatatcg

SEQ ID NO: 53700 - DNA, 50 bp, synthetic construct
  source 1..50: mol_type = other DNA
tttcgttgccaccaccagcttgcgttgaaatgatggaggtggagaaaaaa

SEQ ID NO: 53701 - DNA, 50 bp, synthetic construct
  source 1..50: mol_type = other DNA
cgttatattttttgctgcctgcatcaatgcgttgaaatgtaagtacaacg

SEQ ID NO: 53702 - DNA, 50 bp, synthetic construct
  source 1..50: mol_type = other DNA
ttgtatcaatattcggtactctatatattgaccgggcattgtcagcaaaa

SEQ ID NO: 53703 - DNA, 50 bp, synthetic construct
  source 1..50: mol_type = other DNA
ctttctaaaatcctaaaaaagggtatatcaatttttagaaaactattcaa

SEQ ID NO: 53704 - DNA, 50 bp, synthetic construct
  source 1..50: mol_type = other DNA
tcgcttgacgagccggccatctgacgcaaggcggccggcgcggcgcagga

SEQ ID NO: 53705 - DNA, 50 bp, synthetic construct
  source 1..50: mol_type = other DNA
aatgtaatcaatcctatcacaatctgatttacaatatacttcttttgatt

SEQ ID NO: 53706 - DNA, 50 bp, synthetic construct
  source 1..50: mol_type = other DNA
ggtacaaaaaagaaagcctttgatttttcctgcagtttctgtactgcagc

SEQ ID NO: 53707 - DNA, 50 bp, synthetic construct
  source 1..50: mol_type = other DNA
tttttacgaggcacactggattccgcggaatctcccgtgcagaaaaaaga

SEQ ID NO: 53708 - DNA, 50 bp, synthetic construct
  source 1..50: mol_type = other DNA
tattgtaatcaagaaagatttatgggacgtcattcttgcagatgagccta

SEQ ID NO: 53709 - DNA, 50 bp, synthetic construct
  source 1..50: mol_type = other DNA
cataaatggaggaaacggcggcggggctgtgggtgtttcctgtatgttcg

SEQ ID NO: 53710 - DNA, 50 bp, synthetic construct
  source 1..50: mol_type = other DNA
acagtgccgcccgcttcattgataattgccaatgtcgttggcaatatgga

SEQ ID NO: 53711 - DNA, 50 bp, synthetic construct
  source 1..50: mol_type = other DNA
ctccagaaaaagaaatatcgttaatcacgacgacttttctaaacctgtgg

SEQ ID NO: 53712 - DNA, 50 bp, synthetic construct
  source 1..50: mol_type = other DNA
ggtcggtcttttttgcttttgcaagggtacaatgaacgaaaaaggaagta

SEQ ID NO: 53713 - DNA, 50 bp, synthetic construct
  source 1..50: mol_type = other DNA
tgcgaaaattattttttaattgcaatagtaattgattaataattaaaaga

SEQ ID NO: 53714 - DNA, 50 bp, synthetic construct
  source 1..50: mol_type = other DNA
agattgataaaaacatttttaataaaaattacctctattttccgaaatta

SEQ ID NO: 53715 - DNA, 50 bp, synthetic construct
  source 1..50: mol_type = other DNA
aaacttttatcaaacattattataaggttcttcctggataagaaaagcaa

SEQ ID NO: 53716 - DNA, 50 bp, synthetic construct
  source 1..50: mol_type = other DNA
atatttttgaaccgagccgaaagaaatattggggccacatcgctggatat

SEQ ID NO: 53717 - DNA, 50 bp, synthetic construct
  source 1..50: mol_type = other DNA
gggcagatggcaaaatgctgtctgcttcttgagtattttgcgtactatct

SEQ ID NO: 53718 - DNA, 50 bp, synthetic construct
  source 1..50: mol_type = other DNA
tactgcttcaaatcttcaaagccagtctgctcttttcgcttgtttggggc

SEQ ID NO: 53719 - DNA, 50 bp, synthetic construct
  source 1..50: mol_type = other DNA
cattgctgccgcttgcgttcctctattcagcatagcaagcggcttcactc

SEQ ID NO: 53720 - DNA, 50 bp, synthetic construct
  source 1..50: mol_type = other DNA
tatgccccaccccctgaaaacagaacggaaaaggggtacttatgaacatt

SEQ ID NO: 53721 - DNA, 50 bp, synthetic construct
  source 1..50: mol_type = other DNA
ggacgaccaatgtttctcactccttatacacgtcgaagcattgctcatgg

SEQ ID NO: 53722 - DNA, 50 bp, synthetic construct
  source 1..50: mol_type = other DNA
caattctgcgaataatgtacccaataatcggagctgccttcagggaatcg

SEQ ID NO: 53723 - DNA, 50 bp, synthetic construct
  source 1..50: mol_type = other DNA
tcctccaccacataaaactcagaatgcaggggctttttctctttggagga

SEQ ID NO: 53724 - DNA, 50 bp, synthetic construct
  source 1..50: mol_type = other DNA
ccccttttctgaatcaacataaacttggagggaggttttcagcaaatcag

SEQ ID NO: 53725 - DNA, 50 bp, synthetic construct
  source 1..50: mol_type = other DNA
aattcctgtattgtataggactaataactacaaaagccaatatagatatt

SEQ ID NO: 53726 - DNA, 50 bp, synthetic construct
  source 1..50: mol_type = other DNA
gatctccgacttggctttttgagtaaaaagaaaaagaaaataaggagata

SEQ ID NO: 53727 - DNA, 50 bp, synthetic construct
  source 1..50: mol_type = other DNA
cttaaataaatagtttttgataagtattttctttttgatatatagtaagg

SEQ ID NO: 53728 - DNA, 50 bp, synthetic construct
  source 1..50: mol_type = other DNA
gttcagaacccacacggcatttctgccgtaatggtagtgaggagtatctt

SEQ ID NO: 53729 - DNA, 50 bp, synthetic construct
  source 1..50: mol_type = other DNA
tggctttgaccttagaaagaagtgctttttcttttcattgatcggcgttg

SEQ ID NO: 53730 - DNA, 50 bp, synthetic construct
  source 1..50: mol_type = other DNA
tattctgattggtgtaccgatctgccgtcatcggtaccgtcatcaggccg

SEQ ID NO: 53731 - DNA, 50 bp, synthetic construct
  source 1..50: mol_type = other DNA
catttgaaacatactatacaaaagataatacatatagagtgtggcaaagg

SEQ ID NO: 53732 - DNA, 50 bp, synthetic construct
  source 1..50: mol_type = other DNA
tgcttgacgctccacgccatggatacatcgatggctgccagataggaata

SEQ ID NO: 53733 - DNA, 50 bp, synthetic construct
  source 1..50: mol_type = other DNA
aataggaaagaggaaatcttcggatttgaaaaaatttgaaaattcctatt

SEQ ID NO: 53734 - DNA, 50 bp, synthetic construct
  source 1..50: mol_type = other DNA
cagggaatttttttataaagtgtaaagacaaattataaaaatataacatg

SEQ ID NO: 53735 - DNA, 50 bp, synthetic construct
  source 1..50: mol_type = other DNA
ttttcatacaagaacctcctaaactacttcaaatttatctgttttataat

SEQ ID NO: 53736 - DNA, 50 bp, synthetic construct
  source 1..50: mol_type = other DNA
ccccataggtcgtggtctggccgcagccgcccagcaggctggcaatggcc

SEQ ID NO: 53737 - DNA, 50 bp, synthetic construct
  source 1..50: mol_type = other DNA
ctttacttttttctacatacaaatatttcttttacgctgaaaaaataagg

SEQ ID NO: 53738 - DNA, 50 bp, synthetic construct
  source 1..50: mol_type = other DNA
attaaaacgccaaatcctcggcttgcgttaccccagcctgttctttggat

SEQ ID NO: 53739 - DNA, 50 bp, synthetic construct
  source 1..50: mol_type = other DNA
gctcctttgtattttatgaaaaaaaggtacaccatgccgtacaaagaagt

SEQ ID NO: 53740 - DNA, 50 bp, synthetic construct
  source 1..50: mol_type = other DNA
aaacagcaatgtttcgttatcctgtagatgataccgaaacgtggcttcca

SEQ ID NO: 53741 - DNA, 50 bp, synthetic construct
  source 1..50: mol_type = other DNA
aaccacatcccatacggatacagaattttgtatcacagccagtggtcttt

SEQ ID NO: 53742 - DNA, 50 bp, synthetic construct
  source 1..50: mol_type = other DNA
acgataaacaagtaaaatgagaataaattcttgatcacggtgttcctgag

SEQ ID NO: 53743 - DNA, 50 bp, synthetic construct
  source 1..50: mol_type = other DNA
ttgtgctgtagttgatgaaacggctggcagttgcatcaagagcagtattt

SEQ ID NO: 53744 - DNA, 50 bp, synthetic construct
  source 1..50: mol_type = other DNA
caaaagataattgaataggaactatttgcttatgattccgattgctttcg

SEQ ID NO: 53745 - DNA, 50 bp, synthetic construct
  source 1..50: mol_type = other DNA
agagtataaaaaataaatccttgcggtgcagcacatattttttatgaaaa

SEQ ID NO: 53746 - DNA, 50 bp, synthetic construct
  source 1..50: mol_type = other DNA
gccattgaaccacctcactacaatatatttttatgagggagtgatactat

SEQ ID NO: 53747 - DNA, 50 bp, synthetic construct
  source 1..50: mol_type = other DNA
aaatcattccaaaaatcaataatctgatgtatagacgtacggaaaggagg

SEQ ID NO: 53748 - DNA, 50 bp, synthetic construct
  source 1..50: mol_type = other DNA
tgaacagaacagcagcacggtcggtcagctttctgcagatattcttcccg

SEQ ID NO: 53749 - DNA, 50 bp, synthetic construct
  source 1..50: mol_type = other DNA
gttaaaaatgtacttgacatatatagttactccgttttcaatagtttatt

SEQ ID NO: 53750 - DNA, 50 bp, synthetic construct
  source 1..50: mol_type = other DNA
atcccgcccaccattcagcccatcacgaaggcatggactacgccgtggaa

SEQ ID NO: 53751 - DNA, 50 bp, synthetic construct
  source 1..50: mol_type = other DNA
acaggtttatcggcctgtgggctttctatcccacaacgggatttacctgg

SEQ ID NO: 53752 - DNA, 50 bp, synthetic construct
  source 1..50: mol_type = other DNA
agtaaaacaccaacaaatgttagaaatctaacaaatgtgaggttatccca

SEQ ID NO: 53753 - DNA, 50 bp, synthetic construct
  source 1..50: mol_type = other DNA
gatgaagccaataaaatacgaaagctctttctgatatcctcggtttcatc

SEQ ID NO: 53754 - DNA, 50 bp, synthetic construct
  source 1..50: mol_type = other DNA
cctaaatttgattatttgattattaaaagaaactgttgataaaattttag

SEQ ID NO: 53755 - DNA, 50 bp, synthetic construct
  source 1..50: mol_type = other DNA
gccagcggccggcgttgaatgtcttctgatattggaaataagcaccctat

SEQ ID NO: 53756 - DNA, 50 bp, synthetic construct
  source 1..50: mol_type = other DNA
cgtgactgcctggaagatgataaactggatccaattatctggcagtcaca

SEQ ID NO: 53757 - DNA, 50 bp, synthetic construct
  source 1..50: mol_type = other DNA
gcttgatggccttcattgcgcccagctgaacaatgcgaagctccctgcta

SEQ ID NO: 53758 - DNA, 50 bp, synthetic construct
  source 1..50: mol_type = other DNA
ttgcttacttttcgcataaaatcagctcatccggcatggcggcaaagact

SEQ ID NO: 53759 - DNA, 50 bp, synthetic construct
  source 1..50: mol_type = other DNA
ggaaacctcctcatcatcacccaagctttcagagtgatatatagactacc

SEQ ID NO: 53760 - DNA, 50 bp, synthetic construct
  source 1..50: mol_type = other DNA
gttatccttataaatataagattttaatatctttcttttataagcatatt

SEQ ID NO: 53761 - DNA, 50 bp, synthetic construct
  source 1..50: mol_type = other DNA
tatgcagcagcacaacttcgtggtaggccacgccgcacggctggcccata

SEQ ID NO: 53762 - DNA, 50 bp, synthetic construct
  source 1..50: mol_type = other DNA
tacaagcatcaaaaatctacttaaaaagaaatagatttttgacgagcccg

SEQ ID NO: 53763 - DNA, 50 bp, synthetic construct
  source 1..50: mol_type = other DNA
gccatccaaaaaaagccaccgccggaaggaggctatttttatgcccaaaa

SEQ ID NO: 53764 - DNA, 50 bp, synthetic construct
  source 1..50: mol_type = other DNA
taaaatagaaatctatcctatcattatctttcgaattttatcttagttta

SEQ ID NO: 53765 - DNA, 50 bp, synthetic construct
  source 1..50: mol_type = other DNA
cagcaggaaagcaccctcaactatcataggataagaaaacacgcctgctg

SEQ ID NO: 53766 - DNA, 50 bp, synthetic construct
  source 1..50: mol_type = other DNA
acataaaaagtatggtacttcctgtcttgtaagtggtatattatttcata

SEQ ID NO: 53767 - DNA, 50 bp, synthetic construct
  source 1..50: mol_type = other DNA
aaaatcaatattataaggagaattaagagtcatcgtatattattgatttt

SEQ ID NO: 53768 - DNA, 50 bp, synthetic construct
  source 1..50: mol_type = other DNA
gtttaaaagaatcattgcagttcgagcaagtcaaaactgacggaaagaac

SEQ ID NO: 53769 - DNA, 50 bp, synthetic construct
  source 1..50: mol_type = other DNA
aaagcatggcgcaaagaaaagtaacgttgggcttctgttcaggatttttg

SEQ ID NO: 53770 - DNA, 50 bp, synthetic construct
  source 1..50: mol_type = other DNA
attgtaaaattcatgttacaataaattgatatcgccatcgcttttaccaa

SEQ ID NO: 53771 - DNA, 50 bp, synthetic construct
  source 1..50: mol_type = other DNA
atgttgatatgagaaaccgccagccggctgttttgccagttcgtccacca

SEQ ID NO: 53772 - DNA, 50 bp, synthetic construct
  source 1..50: mol_type = other DNA
aattcatgatcttgcagtctgtcaggtgagagctaccagcaggagcaaca

SEQ ID NO: 53773 - DNA, 50 bp, synthetic construct
  source 1..50: mol_type = other DNA
ggagctggatgccgtgctgctggtgcagcagcttcatgatgaagcacttg

SEQ ID NO: 53774 - DNA, 50 bp, synthetic construct
  source 1..50: mol_type = other DNA
ccattgatgacgtttccgtccgcaatgacttagcagggagtgatataatg

SEQ ID NO: 53775 - DNA, 50 bp, synthetic construct
  source 1..50: mol_type = other DNA
aaggaggtgaagttgccatgaaaaaagatgaataaaatggcctgaacccg

SEQ ID NO: 53776 - DNA, 50 bp, synthetic construct
  source 1..50: mol_type = other DNA
tgttgtactaatgtgacactacccgtgggcagtgttaagttagtacaaaa

SEQ ID NO: 53777 - DNA, 50 bp, synthetic construct
  source 1..50: mol_type = other DNA
acggttttggccatttcttttcactcgtgttgaaggatggataagagaat

SEQ ID NO: 53778 - DNA, 50 bp, synthetic construct
  source 1..50: mol_type = other DNA
aagtgaaatcactcctttccaaccatgccatgaacggagttatgtttttt

SEQ ID NO: 53779 - DNA, 50 bp, synthetic construct
  source 1..50: mol_type = other DNA
tggatttcgtcagcaccatgtcgatatcgccaccatcctgatcaatgtca

SEQ ID NO: 53780 - DNA, 50 bp, synthetic construct
  source 1..50: mol_type = other DNA
attcgatgaaggtcttcgccatgatttcattgtaaccacgttcagcgtta

SEQ ID NO: 53781 - DNA, 50 bp, synthetic construct
  source 1..50: mol_type = other DNA
atttttccatcgaaatagcataaggaacaattctacctcggcacgaaaaa

SEQ ID NO: 53782 - DNA, 50 bp, synthetic construct
  source 1..50: mol_type = other DNA
tcatcatattgagagattcttattccaatgatgtcatatccatatggtgt

SEQ ID NO: 53783 - DNA, 50 bp, synthetic construct
  source 1..50: mol_type = other DNA
gctaccaaaactgcgctacacccggataagtccagcggaaagcgggtgca

SEQ ID NO: 53784 - DNA, 50 bp, synthetic construct
  source 1..50: mol_type = other DNA
ttatcggaaccgcgtaggtggaaaattttcgtgctaaaaattttcaatcc

SEQ ID NO: 53785 - DNA, 50 bp, synthetic construct
  source 1..50: mol_type = other DNA
tttggttttgaaacctttaccggaaaaccgtaaaaccgataaaaagcgaa

SEQ ID NO: 53786 - DNA, 50 bp, synthetic construct
  source 1..50: mol_type = other DNA
cggtcatcccgcccaccattcagcccggaacgtggtgggcgcgtggctgg

SEQ ID NO: 53787 - DNA, 50 bp, synthetic construct
  source 1..50: mol_type = other DNA
gacccttctatttctgatcctgtcaggaggggtgagaaatggcaagagcc

SEQ ID NO: 53788 - DNA, 50 bp, synthetic construct
  source 1..50: mol_type = other DNA
tttacttattttttatttcttcaacaaaccgcgaataaaatcaatctaaa

SEQ ID NO: 53789 - DNA, 50 bp, synthetic construct
  source 1..50: mol_type = other DNA
atagaatcctttgtattctaataaattctgaaataatgctctaattctct

SEQ ID NO: 53790 - DNA, 50 bp, synthetic construct
  source 1..50: mol_type = other DNA
aatcactttttgtgcttattgcatatagcagagaaggccaggaaatgcaa

SEQ ID NO: 53791 - DNA, 50 bp, synthetic construct
  source 1..50: mol_type = other DNA
aaatcatccaatacttcctcagataataccgatgtattcgaagatgatat

SEQ ID NO: 53792 - DNA, 50 bp, synthetic construct
  source 1..50: mol_type = other DNA
gttccgaattgaccccagatcaagttcctgatctgtagaaaccctgcaat

SEQ ID NO: 53793 - DNA, 50 bp, synthetic construct
  source 1..50: mol_type = other DNA
gaaagttgccggatatgcccgtgtttctacgggaaagaccccactaaagt

SEQ ID NO: 53794 - DNA, 50 bp, synthetic construct
  source 1..50: mol_type = other DNA
tttactggggaaatgccgctggaaatggccagagccattgcccggaatgt

SEQ ID NO: 53795 - DNA, 50 bp, synthetic construct
  source 1..50: mol_type = other DNA
atgatatcacctccgtatatattatgtattctatagattctatgagtaat

SEQ ID NO: 53796 - DNA, 50 bp, synthetic construct
  source 1..50: mol_type = other DNA
agatcgcggatcgtaatttctgttccaccagaatctgccatccaatgcct

SEQ ID NO: 53797 - DNA, 50 bp, synthetic construct
  source 1..50: mol_type = other DNA
gccttgatgatgcactccttggtgattcctcaagagcgcaaaagaaaggc

SEQ ID NO: 53798 - DNA, 50 bp, synthetic construct
  source 1..50: mol_type = other DNA
ccaacccgtgaagcgtgtatctcccggtggaaacacgggcatatcctgca

SEQ ID NO: 53799 - DNA, 50 bp, synthetic construct
  source 1..50: mol_type = other DNA
tctgccacttcatcttcgtccgcatatgccgcagaacgggcagcttgact

SEQ ID NO: 53800 - DNA, 50 bp, synthetic construct
  source 1..50: mol_type = other DNA
ctttctgcaccgctttcgagaatccggtgtcagcccgtcggtcagctggt

SEQ ID NO: 53801 - DNA, 50 bp, synthetic construct
  source 1..50: mol_type = other DNA
tttttctataataatcagcttcataaatagttatgaaacttatagatatc

SEQ ID NO: 53802 - DNA, 50 bp, synthetic construct
  source 1..50: mol_type = other DNA
ctcctgctctggggcggggaggtcgccacccgaccacggtagggccggcg

SEQ ID NO: 53803 - DNA, 50 bp, synthetic construct
  source 1..50: mol_type = other DNA
tccgacagctcaccaaaggcttaagtgttttacttttgtgatcttaagga

SEQ ID NO: 53804 - DNA, 50 bp, synthetic construct
  source 1..50: mol_type = other DNA
gcaacgagcaggatgaaagctttgaatacgctgtgtgttcttctccttgt

SEQ ID NO: 53805 - DNA, 50 bp, synthetic construct
  source 1..50: mol_type = other DNA
tcccgtaaaggtgataaagttaccaaatcacctctatcttctatatattt

SEQ ID NO: 53806 - DNA, 50 bp, synthetic construct
  source 1..50: mol_type = other DNA
taagccttgcaaaagcccctgaattgaatcacgggatttgtcaagataag

SEQ ID NO: 53807 - DNA, 50 bp, synthetic construct
  source 1..50: mol_type = other DNA
tctataattcttctacgcttttaacttatcaatagtagcgacatttttat

SEQ ID NO: 53808 - DNA, 50 bp, synthetic construct
  source 1..50: mol_type = other DNA
catcggtcgttttcgatggtgagaagccgcctcatcttctacaacaacga

SEQ ID NO: 53809 - DNA, 50 bp, synthetic construct
  source 1..50: mol_type = other DNA
gatgcagttcctgctccaaccgttccaacgtaccgttttggatctgatag

SEQ ID NO: 53810 - DNA, 50 bp, synthetic construct
  source 1..50: mol_type = other DNA
cttcttgaagtacctgtgagaagtttgtgttgcgataacaataaaaggag

SEQ ID NO: 53811 - DNA, 50 bp, synthetic construct
  source 1..50: mol_type = other DNA
atggaagaaacagttcgtttaaacaaaattaaaaatgatgtttcaaacat

SEQ ID NO: 53812 - DNA, 50 bp, synthetic construct
  source 1..50: mol_type = other DNA
cttttcgctccggagtccatttttccgagaattgaatctggaagtacaat

SEQ ID NO: 53813 - DNA, 50 bp, synthetic construct
  source 1..50: mol_type = other DNA
aagaagtcaacgatatgtcggcaaatttaacgatgccgtgttcatttgca

SEQ ID NO: 53814 - DNA, 50 bp, synthetic construct
  source 1..50: mol_type = other DNA
acttttattcgctttcaatgcagatatcccgtgtgagcttaaagccccca

SEQ ID NO: 53815 - DNA, 50 bp, synthetic construct
  source 1..50: mol_type = other DNA
cggcttttttgtgtttgcaaacattccggaatgggaatacaggaaatcgc

SEQ ID NO: 53816 - DNA, 50 bp, synthetic construct
  source 1..50: mol_type = other DNA
tgtggcgtatttccataagtttcgaatagcccttgccgaaaaatgtccca

SEQ ID NO: 53817 - DNA, 50 bp, synthetic construct
  source 1..50: mol_type = other DNA
aaacgtacaatatggcagaataaacaggtcggctgatcgataatacgtgg

SEQ ID NO: 53818 - DNA, 50 bp, synthetic construct
  source 1..50: mol_type = other DNA
cattgccagcctcatccccagccggagggctgttgatgccgcaggtcaaa

SEQ ID NO: 53819 - DNA, 50 bp, synthetic construct
  source 1..50: mol_type = other DNA
ggcgattgtgcatggcaaaaaaagcttttttcttttcagataaaatcaaa

SEQ ID NO: 53820 - DNA, 50 bp, synthetic construct
  source 1..50: mol_type = other DNA
aatcttgcggtataatatatgcaaatttacatgatatgtacggcgcattt

SEQ ID NO: 53821 - DNA, 50 bp, synthetic construct
  source 1..50: mol_type = other DNA
ttttacaatggtgtcaacagcatatgcatactcctgctttctttctatat

SEQ ID NO: 53822 - DNA, 50 bp, synthetic construct
  source 1..50: mol_type = other DNA
aaaaagaggtcaattactatataatattatgcctgcattgtttgtagttt

SEQ ID NO: 53823 - DNA, 50 bp, synthetic construct
  source 1..50: mol_type = other DNA
gccaatataggggaaatgcaaatgatcagccccattcgcctacgaaagga

SEQ ID NO: 53824 - DNA, 50 bp, synthetic construct
  source 1..50: mol_type = other DNA
tcacggacggctgccagatataatttggacttcatgacagcggggtttcc

SEQ ID NO: 53825 - DNA, 50 bp, synthetic construct
  source 1..50: mol_type = other DNA
gggatttgaacccctaatcttacctgaccgtgaaaagtcattcagcgttc

SEQ ID NO: 53826 - DNA, 50 bp, synthetic construct
  source 1..50: mol_type = other DNA
tctgaaatggtataatatagcttgcttataaaaaatagtactcttatata

SEQ ID NO: 53827 - DNA, 50 bp, synthetic construct
  source 1..50: mol_type = other DNA
tagagttaacatcttcctccaaagtatattggtttaagacaagaagaagt

SEQ ID NO: 53828 - DNA, 50 bp, synthetic construct
  source 1..50: mol_type = other DNA
ttgacgaaaacccattttattcttatacaagcgtttaaaacatttgtcaa

SEQ ID NO: 53829 - DNA, 50 bp, synthetic construct
  source 1..50: mol_type = other DNA
tatacagttttttacatataaccattcggttttatcagcatccctgtttc

SEQ ID NO: 53830 - DNA, 50 bp, synthetic construct
  source 1..50: mol_type = other DNA
taaggttgatagtatgaatatgcagagtgatatatagactaccaaaacga

SEQ ID NO: 53831 - DNA, 50 bp, synthetic construct
  source 1..50: mol_type = other DNA
ctttatctgatagtaagacagtttaaaaagatatttatattcagagaaag

SEQ ID NO: 53832 - DNA, 50 bp, synthetic construct
  source 1..50: mol_type = other DNA
caggcaaatttcaaggccttttaagtcaaaccaaacgaaaaattcgcctt

SEQ ID NO: 53833 - DNA, 50 bp, synthetic construct
  source 1..50: mol_type = other DNA
aggctaaaagtggtgccattttcacttgaagatggggcgtattttcaacc

SEQ ID NO: 53834 - DNA, 50 bp, synthetic construct
  source 1..50: mol_type = other DNA
aaactggtgatgtagtgaatgctgttctcttgacactttcggacaaggga

SEQ ID NO: 53835 - DNA, 50 bp, synthetic construct
  source 1..50: mol_type = other DNA
gcatttccaaggattgatcaatctgcaagcgtttacgctattggaaatca

SEQ ID NO: 53836 - DNA, 50 bp, synthetic construct
  source 1..50: mol_type = other DNA
gctaccatacaaaagacctccttttcaaaagacatgttttcccaatcttc

SEQ ID NO: 53837 - DNA, 50 bp, synthetic construct
  source 1..50: mol_type = other DNA
ccttattttttcagcgtaaaagaaatatttgtatgtagaaaaaagtaaag

SEQ ID NO: 53838 - DNA, 50 bp, synthetic construct
  source 1..50: mol_type = other DNA
caatcactgtaccagacggggcagcatttttaatcacggtatataaattt

SEQ ID NO: 53839 - DNA, 50 bp, synthetic construct
  source 1..50: mol_type = other DNA
cagataatagtctttacctctcgcaagttaggtgtaaatcctaaagaaat

SEQ ID NO: 53840 - DNA, 50 bp, synthetic construct
  source 1..50: mol_type = other DNA
tcccgcggatcagataccggggcgacaaaatccacactgaaagcgcggga

SEQ ID NO: 53841 - DNA, 50 bp, synthetic construct
  source 1..50: mol_type = other DNA
ttccccaggcaccgaaaaaaagggtataaaaaacttttgaagaaagggaa

SEQ ID NO: 53842 - DNA, 50 bp, synthetic construct
  source 1..50: mol_type = other DNA
tcaaaagataccatatttatcatctattggatatagaagctatctgatgt

SEQ ID NO: 53843 - DNA, 50 bp, synthetic construct
  source 1..50: mol_type = other DNA
catatgaatttcctccatttttgtaatcaacaagtttggtaattgataca

SEQ ID NO: 53844 - DNA, 50 bp, synthetic construct
  source 1..50: mol_type = other DNA
aaatagtaaaaaagggcaaaaaatttccgtttttgataccggtagtggct

SEQ ID NO: 53845 - DNA, 50 bp, synthetic construct
  source 1..50: mol_type = other DNA
atattcataattctgctcttcacaattgtgacatttagagtgatgtatat

SEQ ID NO: 53846 - DNA, 50 bp, synthetic construct
  source 1..50: mol_type = other DNA
tttgtcttatcatccatatcatcgataactgaaaattttgataatccaat

SEQ ID NO: 53847 - DNA, 50 bp, synthetic construct
  source 1..50: mol_type = other DNA
tctgcctcttagtatcgagtggcttatgacaatcccgtcaaacaggcaga

SEQ ID NO: 53848 - DNA, 50 bp, synthetic construct
  source 1..50: mol_type = other DNA
ctttcgatttccgcttctttgacgaaagtgcaattagttgatgaaaaaat

SEQ ID NO: 53849 - DNA, 50 bp, synthetic construct
  source 1..50: mol_type = other DNA
gccgcgcagaagcggcgtgttgctggttggacggactattcggatgcaaa

SEQ ID NO: 53850 - DNA, 50 bp, synthetic construct
  source 1..50: mol_type = other DNA
gagcgcctttttaatatagacatcatctgcttggcataggttttggcatc

SEQ ID NO: 53851 - DNA, 50 bp, synthetic construct
  source 1..50: mol_type = other DNA
gagcacgtcgactattggtgcaaaggattgcaccaaatatttctgctctc

SEQ ID NO: 53852 - DNA, 50 bp, synthetic construct
  source 1..50: mol_type = other DNA
gttatgcttattatcctgtggctctagagccctatctttttaagatattt

SEQ ID NO: 53853 - DNA, 50 bp, synthetic construct
  source 1..50: mol_type = other DNA
gcgtaaaaaataagccctttcaaatttttaacagagcttttattttatca

SEQ ID NO: 53854 - DNA, 50 bp, synthetic construct
  source 1..50: mol_type = other DNA
ccttgcataagctaatggctcaaggcgtttagagtgatgtatatacactg

SEQ ID NO: 53855 - DNA, 50 bp, synthetic construct
  source 1..50: mol_type = other DNA
agattgcttgccggtggggacaacattatgtcctaaaaagcttgctatta

SEQ ID NO: 53856 - DNA, 50 bp, synthetic construct
  source 1..50: mol_type = other DNA
aacatatcatctttttgtgttaaaatgaatctgaaaaattatatccaatt

SEQ ID NO: 53857 - DNA, 50 bp, synthetic construct
  source 1..50: mol_type = other DNA
aggcatattaggcgtattaaaggcgcgcaccgagccctccggcagcacct

SEQ ID NO: 53858 - DNA, 50 bp, synthetic construct
  source 1..50: mol_type = other DNA
ggacgatcctaatttgcagaaatggtcgttggttcaaatccagctcccgc

SEQ ID NO: 53859 - DNA, 50 bp, synthetic construct
  source 1..50: mol_type = other DNA
acacgggtgcgcggggcgtccagccgccgcaattcccgcagcacctatgt

SEQ ID NO: 53860 - DNA, 50 bp, synthetic construct
  source 1..50: mol_type = other DNA
caagcagattcttatccgtcattacctgtaaacggataccgctcattcga

SEQ ID NO: 53861 - DNA, 50 bp, synthetic construct
  source 1..50: mol_type = other DNA
gcgtgagcggtctttccacacataattgcgtctttcggctcatacatcgg

SEQ ID NO: 53862 - DNA, 50 bp, synthetic construct
  source 1..50: mol_type = other DNA
cagtcaattcggagaaataaattgaaaaatgaaacggtcaaaaagttttg

SEQ ID NO: 53863 - DNA, 50 bp, synthetic construct
  source 1..50: mol_type = other DNA
atttcttgcaataatttatttaatattccaaaaaacatattatttgaaat

SEQ ID NO: 53864 - DNA, 50 bp, synthetic construct
  source 1..50: mol_type = other DNA
gtcatctgcggcaactgcggccatgcatggcaaaggtaaagctgccagat

SEQ ID NO: 53865 - DNA, 50 bp, synthetic construct
  source 1..50: mol_type = other DNA
taaattacaacacgtctcatcgcatttatgaattgacggttatgcgagta

SEQ ID NO: 53866 - DNA, 50 bp, synthetic construct
  source 1..50: mol_type = other DNA
ttatactctatgtaaagggatatatttctatccttttttatctgatatta

SEQ ID NO: 53867 - DNA, 50 bp, synthetic construct
  source 1..50: mol_type = other DNA
cggcggggtgtttttgctgttgaaatttgttttgcgaactgaccaagcac

SEQ ID NO: 53868 - DNA, 50 bp, synthetic construct
  source 1..50: mol_type = other DNA
ttcaagtgctatatctactgcaccaaacagaacgatataatacatttgaa

SEQ ID NO: 53869 - DNA, 50 bp, synthetic construct
  source 1..50: mol_type = other DNA
attagaaataaactggccgccttcttcacagcgagcagattactatgaat

SEQ ID NO: 53870 - DNA, 50 bp, synthetic construct
  source 1..50: mol_type = other DNA
catatccaacgtatctgtacctatgaattggcacggatacgttggatatg

SEQ ID NO: 53871 - DNA, 50 bp, synthetic construct
  source 1..50: mol_type = other DNA
tgttgtactaactataacgcacctacaggagcgtatgagatagtacaaca

SEQ ID NO: 53872 - DNA, 50 bp, synthetic construct
  source 1..50: mol_type = other DNA
ccatgatggaaaatcaagccattacctctcccagcgatactccatgccct

SEQ ID NO: 53873 - DNA, 50 bp, synthetic construct
  source 1..50: mol_type = other DNA
cttcttgccattcttatcatcctttcgaggattgtaaacatggcaagata

SEQ ID NO: 53874 - DNA, 50 bp, synthetic construct
  source 1..50: mol_type = other DNA
ttggtagtctatatatcactctgaaatcagacgcagcagtcatctgtcga

SEQ ID NO: 53875 - DNA, 50 bp, synthetic construct
  source 1..50: mol_type = other DNA
aatggggtagtattcgacgtagctctgttgctcaacaatatctaaatggg

SEQ ID NO: 53876 - DNA, 50 bp, synthetic construct
  source 1..50: mol_type = other DNA
aggttctttgccgtctgcatggcagcagccatgataacgccgaactctgc

SEQ ID NO: 53877 - DNA, 50 bp, synthetic construct
  source 1..50: mol_type = other DNA
gaaagtgatttactatgccttatttaaagaagctataaaaaatcaagagg

SEQ ID NO: 53878 - DNA, 50 bp, synthetic construct
  source 1..50: mol_type = other DNA
ttatcgggcgggtatctttttcctgaccctaaaatatatcaggaggataa

SEQ ID NO: 53879 - DNA, 50 bp, synthetic construct
  source 1..50: mol_type = other DNA
gaatcggaatatttgcactttatattgggaaagactgaatatgaatattg

SEQ ID NO: 53880 - DNA, 50 bp, synthetic construct
  source 1..50: mol_type = other DNA
aagtagcgttgatagatcatttttggcaaaatgaacgccgccatctacat

SEQ ID NO: 53881 - DNA, 50 bp, synthetic construct
  source 1..50: mol_type = other DNA
tggaatatatgtaatatctgtttgacagtaggattattacattttttagt

SEQ ID NO: 53882 - DNA, 50 bp, synthetic construct
  source 1..50: mol_type = other DNA
actttgataggtcgatgtcagaaaatattataacacaaaaagagcaaatt

SEQ ID NO: 53883 - DNA, 50 bp, synthetic construct
  source 1..50: mol_type = other DNA
tgttacctctcctaccatctgcttatatgcagtcattgctggaaatagtg

SEQ ID NO: 53884 - DNA, 50 bp, synthetic construct
  source 1..50: mol_type = other DNA
ggtatgaaccgtgtagccgagaatgcggtcttttcatttttgttgggact

SEQ ID NO: 53885 - DNA, 50 bp, synthetic construct
  source 1..50: mol_type = other DNA
tgtaccgacggtcggtaatataaaaatgactgtgaccgaccgtgctgctg

SEQ ID NO: 53886 - DNA, 50 bp, synthetic construct
  source 1..50: mol_type = other DNA
agcgcacaaacattctgcttgtatgcaatggagcaaaaaaattcatggca

SEQ ID NO: 53887 - DNA, 50 bp, synthetic construct
  source 1..50: mol_type = other DNA
gctgccaatcaagttcgacagctttaaacaagagaaagatgatctctgac

SEQ ID NO: 53888 - DNA, 50 bp, synthetic construct
  source 1..50: mol_type = other DNA
agcagagaaagattgtggaacagatatcttggttctaatctggtgctgct

SEQ ID NO: 53889 - DNA, 50 bp, synthetic construct
  source 1..50: mol_type = other DNA
atttaagttccgcaatcagatcgacacgcatctgggtgcatggcggaaac

SEQ ID NO: 53890 - DNA, 50 bp, synthetic construct
  source 1..50: mol_type = other DNA
tgagcccgaatccgatttataaggatcctctttaatcgtggcgcagccgt

SEQ ID NO: 53891 - DNA, 50 bp, synthetic construct
  source 1..50: mol_type = other DNA
aatttccaacatttatgtaccaatgaattggcacattgatgttggatatt

SEQ ID NO: 53892 - DNA, 50 bp, synthetic construct
  source 1..50: mol_type = other DNA
agattggaaagactacggtgttcaattgatacccagcgtcgcaccaatct

SEQ ID NO: 53893 - DNA, 50 bp, synthetic construct
  source 1..50: mol_type = other DNA
aggcagcagagaaatccctgccgcttgcggcagcaggttcgtctataatt

SEQ ID NO: 53894 - DNA, 50 bp, synthetic construct
  source 1..50: mol_type = other DNA
aaaaaagggtataaaaaagaaagccggaattcatgtttcaacccgtttat

SEQ ID NO: 53895 - DNA, 50 bp, synthetic construct
  source 1..50: mol_type = other DNA
gcaagcgagaacatacctgcgataagaaggtaagcaatgagagtagttct

SEQ ID NO: 53896 - DNA, 50 bp, synthetic construct
  source 1..50: mol_type = other DNA
aggaggctgattagatgggagatgaaacggagtacaggtatcagcatagt

SEQ ID NO: 53897 - DNA, 50 bp, synthetic construct
  source 1..50: mol_type = other DNA
atgtttattatgagtctgaaaatatatactttaggagtgataataatgaa

SEQ ID NO: 53898 - DNA, 50 bp, synthetic construct
  source 1..50: mol_type = other DNA
gagcgcgaatcgtactttgtcccgctacggacaatttacccctcgatttc

SEQ ID NO: 53899 - DNA, 50 bp, synthetic construct
  source 1..50: mol_type = other DNA
tcggagaagatgccggtttccacaggattgatggtcggcggaatgactgt

SEQ ID NO: 53900 - DNA, 50 bp, synthetic construct
  source 1..50: mol_type = other DNA
cttcttattgtgttcctttcatagtggtctgtaaagaacacaaaggaaac

SEQ ID NO: 53901 - DNA, 50 bp, synthetic construct
  source 1..50: mol_type = other DNA
ccgtttctcctgatgtgctcaaaatatgggaaaatcatcatgagaaataa

SEQ ID NO: 53902 - DNA, 50 bp, synthetic construct
  source 1..50: mol_type = other DNA
cttgtacacggtggagtccttcagccttaaaggatagcaacaagtaacct

SEQ ID NO: 53903 - DNA, 50 bp, synthetic construct
  source 1..50: mol_type = other DNA
ttgcgtcacgctgagccatagcgtcatcataaatcatcaacgtgacgcat

SEQ ID NO: 53904 - DNA, 50 bp, synthetic construct
  source 1..50: mol_type = other DNA
ctgccagcataaaagatatgttgcgtacaacataaaattttgacttccga

SEQ ID NO: 53905 - DNA, 50 bp, synthetic construct
  source 1..50: mol_type = other DNA
ctttatttatttttattttactggattatgtttaaaaaacttcaggaaag

SEQ ID NO: 53906 - DNA, 50 bp, synthetic construct
  source 1..50: mol_type = other DNA
ccttgaatgccgtaacgcattgggcgaatgacccgccgcgtacaaaaagc

SEQ ID NO: 53907 - DNA, 50 bp, synthetic construct
  source 1..50: mol_type = other DNA
aagagtaaaaaaaggtttaaaaaacgttttattgcctcactttaacctta

SEQ ID NO: 53908 - DNA, 50 bp, synthetic construct
  source 1..50: mol_type = other DNA
cccggtaccagcgcagattagaatgaaggaaaatctgacgaaaggagagg

SEQ ID NO: 53909 - DNA, 50 bp, synthetic construct
  source 1..50: mol_type = other DNA
gaccttgctttgggaagtctattataaaaagaactttactgtaagcttta

SEQ ID NO: 53910 - DNA, 50 bp, synthetic construct
  source 1..50: mol_type = other DNA
actcaccaactgatagataaaatcggtttcagttctttcatgctgtgata

SEQ ID NO: 53911 - DNA, 50 bp, synthetic construct
  source 1..50: mol_type = other DNA
aatatgcttataaaagaaagatattaaaatcttatatttataaggataac

SEQ ID NO: 53912 - DNA, 50 bp, synthetic construct
  source 1..50: mol_type = other DNA
ccatatgctgcttctttgcttgtatatgtaagttattacgcaacaagtat

SEQ ID NO: 53913 - DNA, 50 bp, synthetic construct
  source 1..50: mol_type = other DNA
aggcgcatatgatattcgctgcgtttccgtcgcgaaaagcaccgccgcct

SEQ ID NO: 53914 - DNA, 50 bp, synthetic construct
  source 1..50: mol_type = other DNA
gcgcaccttgcagaagcggcaccattcattgccatctcacgcatgtctat

SEQ ID NO: 53915 - DNA, 50 bp, synthetic construct
  source 1..50: mol_type = other DNA
gaaaagtttcatttgacacaaaagatttgttggatggagaaaaaacacag

SEQ ID NO: 53916 - DNA, 50 bp, synthetic construct
  source 1..50: mol_type = other DNA
tattatataatatttcaaagccgattttttaatgcaaaaaaataataata

SEQ ID NO: 53917 - DNA, 50 bp, synthetic construct
  source 1..50: mol_type = other DNA
atgtcgctatttagcaaataaaaaaatttttatgatgcactggtttctat

SEQ ID NO: 53918 - DNA, 50 bp, synthetic construct
  source 1..50: mol_type = other DNA
gcataaaactcgttcaacacatttttgtatgtggtgagcaggttttgtgc

SEQ ID NO: 53919 - DNA, 50 bp, synthetic construct
  source 1..50: mol_type = other DNA
gacacgccgctttacaaactgcgagtccatcgttttcaatgtggcggctg

SEQ ID NO: 53920 - DNA, 50 bp, synthetic construct
  source 1..50: mol_type = other DNA
attgaccatacggatatcgtactggcaagaaggaggcaaaaatcatgaac

SEQ ID NO: 53921 - DNA, 50 bp, synthetic construct
  source 1..50: mol_type = other DNA
gtattgcctgtttataagggtgctacatggctttttgctgcaggcagtgc

SEQ ID NO: 53922 - DNA, 50 bp, synthetic construct
  source 1..50: mol_type = other DNA
tacaatctgcgacacctttcacctttattaaattacacaacttttttgca

SEQ ID NO: 53923 - DNA, 50 bp, synthetic construct
  source 1..50: mol_type = other DNA
tcctgatttctgggataacctcacatgtatactggctgacttaataagat

SEQ ID NO: 53924 - DNA, 50 bp, synthetic construct
  source 1..50: mol_type = other DNA
tcttgtcaattttgaaaattccatcaatgttatcaataacactgacaacg

SEQ ID NO: 53925 - DNA, 50 bp, synthetic construct
  source 1..50: mol_type = other DNA
tttaaatactctaaatgctttttcaagtaccggccattattgggtacatt

SEQ ID NO: 53926 - DNA, 50 bp, synthetic construct
  source 1..50: mol_type = other DNA
tatggtttctctcacagtcatcaaggcggcagagaatgagcgaaaccatg

SEQ ID NO: 53927 - DNA, 50 bp, synthetic construct
  source 1..50: mol_type = other DNA
atctcctgttgggagatcaatgccggggcatccgtctccttttatattat

SEQ ID NO: 53928 - DNA, 50 bp, synthetic construct
  source 1..50: mol_type = other DNA
ggcagtcccgtttaaatccactgccggcagtctttttctgtaccacggca

SEQ ID NO: 53929 - DNA, 50 bp, synthetic construct
  source 1..50: mol_type = other DNA
tatcatcctttctctgaatataaatatcttcgatcatggctgtgatgaag

SEQ ID NO: 53930 - DNA, 50 bp, synthetic construct
  source 1..50: mol_type = other DNA
atatatcactctgaaagccaataatatgcttggtgatccggaatatatcc

SEQ ID NO: 53931 - DNA, 50 bp, synthetic construct
  source 1..50: mol_type = other DNA
tccccggtgttcctgccaatgcgcacaaacattgagtaacataacgataa

SEQ ID NO: 53932 - DNA, 50 bp, synthetic construct
  source 1..50: mol_type = other DNA
tagataatggtattgccgttatcgatctggaacaacttcaacaatatctg

SEQ ID NO: 53933 - DNA, 50 bp, synthetic construct
  source 1..50: mol_type = other DNA
tttttgaaaatccttggtagtttttcaaaggctccacattcatccaaaaa

SEQ ID NO: 53934 - DNA, 50 bp, synthetic construct
  source 1..50: mol_type = other DNA
gccgattagtcaagcaataaaagggcatttttagtgtaaacttaagtata

SEQ ID NO: 53935 - DNA, 50 bp, synthetic construct
  source 1..50: mol_type = other DNA
actgcaacagaccctttttgtttgacgaaacaaaaatctttagtttttac

SEQ ID NO: 53936 - DNA, 50 bp, synthetic construct
  source 1..50: mol_type = other DNA
gcggccttcatggatttttttgctttagtaaaaaaatcgaagaagcagag

SEQ ID NO: 53937 - DNA, 50 bp, synthetic construct
  source 1..50: mol_type = other DNA
actctaaaaggccggaatatcaagcgataagtattcgggatgcttagagc

SEQ ID NO: 53938 - DNA, 50 bp, synthetic construct
  source 1..50: mol_type = other DNA
atcttcagccaatagtacaagttcatggtaaaatacccacctctgaacat

SEQ ID NO: 53939 - DNA, 50 bp, synthetic construct
  source 1..50: mol_type = other DNA
gcaggagccggtagctggcctttgcgaggcggcaatagaccgccacccgc

SEQ ID NO: 53940 - DNA, 50 bp, synthetic construct
  source 1..50: mol_type = other DNA
ccggtgagctgggacagccgcagtagcttgcgggcctcgctgctcagtac

SEQ ID NO: 53941 - DNA, 50 bp, synthetic construct
  source 1..50: mol_type = other DNA
actcccctttgaactttttgtgaacattccgggggtgagcatcagggctt

SEQ ID NO: 53942 - DNA, 50 bp, synthetic construct
  source 1..50: mol_type = other DNA
ctcctgctttgcgatctttgcttcaaatggcaagagccgcaaagcaagac

SEQ ID NO: 53943 - DNA, 50 bp, synthetic construct
  source 1..50: mol_type = other DNA
ataacggttcttgtcttttaatttatgtgaactaagtatagccccgtgga

SEQ ID NO: 53944 - DNA, 50 bp, synthetic construct
  source 1..50: mol_type = other DNA
agcgatttgaaaagcggagcaaaaaattttttatcgcagttcaagtccag

SEQ ID NO: 53945 - DNA, 50 bp, synthetic construct
  source 1..50: mol_type = other DNA
tctttgatcctttttgcaataagaattcgagttccaaaatggatataagg

SEQ ID NO: 53946 - DNA, 50 bp, synthetic construct
  source 1..50: mol_type = other DNA
atgtccgagctcttttgcttattgaagaatataaaaaatacatcggagga

SEQ ID NO: 53947 - DNA, 50 bp, synthetic construct
  source 1..50: mol_type = other DNA
gccattgaaccacctcactacaatatatttttatgagggagtgatgctat

SEQ ID NO: 53948 - DNA, 50 bp, synthetic construct
  source 1..50: mol_type = other DNA
atcattgcgaatcctcttacttctcgaagtcgaagaggacgatctctgat

SEQ ID NO: 53949 - DNA, 50 bp, synthetic construct
  source 1..50: mol_type = other DNA
cctcctttcctttagggaggtttgcctaaaatccccttaattaaagggga

SEQ ID NO: 53950 - DNA, 50 bp, synthetic construct
  source 1..50: mol_type = other DNA
aacgaaaagaagaaacgccgggtggcaggtatgagttttgggaaaatgaa

SEQ ID NO: 53951 - DNA, 50 bp, synthetic construct
  source 1..50: mol_type = other DNA
ttatagtatcgagtacaactttacaaataaatactttatgcccattataa

SEQ ID NO: 53952 - DNA, 50 bp, synthetic construct
  source 1..50: mol_type = other DNA
aataaaaaatccctcattgtatggtaccacccaactttgggtacattatt

SEQ ID NO: 53953 - DNA, 50 bp, synthetic construct
  source 1..50: mol_type = other DNA
gtgtcgggagaacagcgtcaattcatgaaagcaaagtggactccggagcg

SEQ ID NO: 53954 - DNA, 50 bp, synthetic construct
  source 1..50: mol_type = other DNA
agactattgaaagacaaagttaaagatttacttatgaattggaataatca

SEQ ID NO: 53955 - DNA, 50 bp, synthetic construct
  source 1..50: mol_type = other DNA
tcttcgctctccatcgtggcaaagaggtttgccatttgcagcttcgatta

SEQ ID NO: 53956 - DNA, 50 bp, synthetic construct
  source 1..50: mol_type = other DNA
actgccgtgtttccacggatcaggaagcagatcagaaataagctggcgaa

SEQ ID NO: 53957 - DNA, 50 bp, synthetic construct
  source 1..50: mol_type = other DNA
gtccatatccatccggtcagtatcatgaattcgaggcagtggatgcggag

SEQ ID NO: 53958 - DNA, 50 bp, synthetic construct
  source 1..50: mol_type = other DNA
ttgtcaatttgtcttcaaaaaatttcaaaactgtgaagctggtcttcctg

SEQ ID NO: 53959 - DNA, 50 bp, synthetic construct
  source 1..50: mol_type = other DNA
ggcgatttccttcatttccggcgtccgcgccggtaaataactcgattgaa

SEQ ID NO: 53960 - DNA, 50 bp, synthetic construct
  source 1..50: mol_type = other DNA
ttccttagctctttttttccattcttttatgcgaaaaatcaacaaaatcg

SEQ ID NO: 53961 - DNA, 50 bp, synthetic construct
  source 1..50: mol_type = other DNA
acgcctcactactggttttgatgccagcaccatccatgatgctgtcgcgg

SEQ ID NO: 53962 - DNA, 50 bp, synthetic construct
  source 1..50: mol_type = other DNA
cgcaaaggcgagcgatgaaaagagctctcttttcatttttcggattttgg

SEQ ID NO: 53963 - DNA, 50 bp, synthetic construct
  source 1..50: mol_type = other DNA
aattacaaggtgtaattagcaaaatatttaaagaattatcaaagggtatg

SEQ ID NO: 53964 - DNA, 50 bp, synthetic construct
  source 1..50: mol_type = other DNA
acttttcttattcatttttcctccatagaggttttagaaaaaaataaaaa

SEQ ID NO: 53965 - DNA, 50 bp, synthetic construct
  source 1..50: mol_type = other DNA
agtggaaagtgtttaatcaataatattatatctaataaaaactttgataa

SEQ ID NO: 53966 - DNA, 50 bp, synthetic construct
  source 1..50: mol_type = other DNA
aatctaatgcaaagcatattatacactgttgttatgaccataatttgatt

SEQ ID NO: 53967 - DNA, 50 bp, synthetic construct
  source 1..50: mol_type = other DNA
atcaaatattaaccaatgagaaatataggttaatcgaggtgatagatgat

SEQ ID NO: 53968 - DNA, 50 bp, synthetic construct
  source 1..50: mol_type = other DNA
ctgccgcagtctcatctggtgtaccgatacgggtgaggagacctacgcca

SEQ ID NO: 53969 - DNA, 50 bp, synthetic construct
  source 1..50: mol_type = other DNA
cctaccgaatgaatctgcccccaagcttggtttgccgttcgaagtcggcc

SEQ ID NO: 53970 - DNA, 50 bp, synthetic construct
  source 1..50: mol_type = other DNA
tgttccacgctccattccaaaatcataaagaagtaatagaagtgtaaaaa

SEQ ID NO: 53971 - DNA, 50 bp, synthetic construct
  source 1..50: mol_type = other DNA
aaattatataatcatctattctatgcttacctttactttctatataatta

SEQ ID NO: 53972 - DNA, 50 bp, synthetic construct
  source 1..50: mol_type = other DNA
gtttcccggcagaaattactggaaggaggtattatttttatgataaaaac

SEQ ID NO: 53973 - DNA, 50 bp, synthetic construct
  source 1..50: mol_type = other DNA
tggaaaaatacgatatactaaatgtgcattaagtgaagcacagaagatgg

SEQ ID NO: 53974 - DNA, 50 bp, synthetic construct
  source 1..50: mol_type = other DNA
tatttgtagtcatcattgaatttgtaagatgtcaacgatttttttgaata

SEQ ID NO: 53975 - DNA, 50 bp, synthetic construct
  source 1..50: mol_type = other DNA
gaatttgtttataaagggaatacttaagacgaacatttcatataggagtc

SEQ ID NO: 53976 - DNA, 50 bp, synthetic construct
  source 1..50: mol_type = other DNA
ggaaataaagtatattcagtcggagaaataacaaaaaaccctttatttgc

SEQ ID NO: 53977 - DNA, 50 bp, synthetic construct
  source 1..50: mol_type = other DNA
accaaggagtgattctatgtctattaattattttaaaaattttttttaga

SEQ ID NO: 53978 - DNA, 50 bp, synthetic construct
  source 1..50: mol_type = other DNA
tcaggccagaatcgctagactccacaatgagagtagttctttatatgaga

SEQ ID NO: 53979 - DNA, 50 bp, synthetic construct
  source 1..50: mol_type = other DNA
agcaaataaccgtcataattaatggttatatcgtgatgcagtgatttgca

SEQ ID NO: 53980 - DNA, 50 bp, synthetic construct
  source 1..50: mol_type = other DNA
ctttatttagagttaatccagtacccaaacatttctatttcgccataaga

SEQ ID NO: 53981 - DNA, 50 bp, synthetic construct
  source 1..50: mol_type = other DNA
ggacagggcataaggcggtacaggaaaccatacccttgtatggagtgacc

SEQ ID NO: 53982 - DNA, 50 bp, synthetic construct
  source 1..50: mol_type = other DNA
gtattcttttcatcgtttgtctgtattcagagaaaggatgataagaatgg

SEQ ID NO: 53983 - DNA, 50 bp, synthetic construct
  source 1..50: mol_type = other DNA
tttaaaataaaacagattattttatgtaaaatgtgctgtatcgtgataaa

SEQ ID NO: 53984 - DNA, 50 bp, synthetic construct
  source 1..50: mol_type = other DNA
cttatgtatcttgttgccatagctgtatagataacaacaagatacccaac

SEQ ID NO: 53985 - DNA, 50 bp, synthetic construct
  source 1..50: mol_type = other DNA
ttctttcggcacctctgttgcatttaatgttttcaaatgtgccgaaggta

SEQ ID NO: 53986 - DNA, 50 bp, synthetic construct
  source 1..50: mol_type = other DNA
atgattagaaagattttggtgattaaaatacacaatatcttaaattgctg

SEQ ID NO: 53987 - DNA, 50 bp, synthetic construct
  source 1..50: mol_type = other DNA
agagtataaaaaataaacccttgcgggaaagaccacatttttgttgagcg

SEQ ID NO: 53988 - DNA, 50 bp, synthetic construct
  source 1..50: mol_type = other DNA
ctgttcttcataatctttatagtattctgggttgagattatgcccaaaat

SEQ ID NO: 53989 - DNA, 50 bp, synthetic construct
  source 1..50: mol_type = other DNA
caggtgtaaataaatatgctataattttatatcatatttttgtttataat

SEQ ID NO: 53990 - DNA, 50 bp, synthetic construct
  source 1..50: mol_type = other DNA
tactgcccaatactgcctgattttgccaccaatcgctatatcgcgttgtt

SEQ ID NO: 53991 - DNA, 50 bp, synthetic construct
  source 1..50: mol_type = other DNA
atatcagagccgataaactggaagagcttgtggccggttgtaatctatta

SEQ ID NO: 53992 - DNA, 50 bp, synthetic construct
  source 1..50: mol_type = other DNA
ttatctttctttgacagcaaacagacctgtacaatctcatagaaagcgag

SEQ ID NO: 53993 - DNA, 50 bp, synthetic construct
  source 1..50: mol_type = other DNA
ggacggttgcaaacaatgtgcaggtgaccttgccatatttcgatagctcc

SEQ ID NO: 53994 - DNA, 50 bp, synthetic construct
  source 1..50: mol_type = other DNA
ttatatattcttcgttctttgttgtacaacaaaaaacggaacaaatatct

SEQ ID NO: 53995 - DNA, 50 bp, synthetic construct
  source 1..50: mol_type = other DNA
tatagcatattttctgaaaaaagtcaaaattttctttaagatatgccata

SEQ ID NO: 53996 - DNA, 50 bp, synthetic construct
  source 1..50: mol_type = other DNA
aaattcgcaaactacaactaaaacctattttatcattttttaacaaattt

SEQ ID NO: 53997 - DNA, 50 bp, synthetic construct
  source 1..50: mol_type = other DNA
atttataaacaccctctactttatatttgaagtaggttttgttcatgctt

SEQ ID NO: 53998 - DNA, 50 bp, synthetic construct
  source 1..50: mol_type = other DNA
gataaatcaacaacatctttatagtcatgtaaagttacatttgatttaag

SEQ ID NO: 53999 - DNA, 50 bp, synthetic construct
  source 1..50: mol_type = other DNA
tttctggttcctcgaacccccaaatatttatttttatctttgacctatat

SEQ ID NO: 54000 - DNA, 50 bp, synthetic construct
  source 1..50: mol_type = other DNA
ctgcgggtcgcggcctatgcccgcgtgccggtaccggccgaagccggcag

SEQ ID NO: 54001 - DNA, 50 bp, synthetic construct
  source 1..50: mol_type = other DNA
acatgaaaacaacccgcttgcacagcgctgccctgggcttttgcagatgg

SEQ ID NO: 54002 - DNA, 50 bp, synthetic construct
  source 1..50: mol_type = other DNA
gaaattgtataaaggtactatgccgcggcacagtacactaatacaatgtt

SEQ ID NO: 54003 - DNA, 50 bp, synthetic construct
  source 1..50: mol_type = other DNA
acaacttttctattttctatttatttttcaatagtaaattaaaaatttat

SEQ ID NO: 54004 - DNA, 50 bp, synthetic construct
  source 1..50: mol_type = other DNA
ttggtattgctttgcttccctatcatgaaactgcccgggagtgaacccaa

SEQ ID NO: 54005 - DNA, 50 bp, synthetic construct
  source 1..50: mol_type = other DNA
tgtcgtgcttccggtgtccaacggcttataaaattaactgaaaaacggca

SEQ ID NO: 54006 - DNA, 50 bp, synthetic construct
  source 1..50: mol_type = other DNA
acccaaagttggctggtatttttcctgaaaaacggcaaacaaaaatacaa

SEQ ID NO: 54007 - DNA, 50 bp, synthetic construct
  source 1..50: mol_type = other DNA
tattagcaataggaaacataaaaccggtattagcggctatattgccctct

SEQ ID NO: 54008 - DNA, 50 bp, synthetic construct
  source 1..50: mol_type = other DNA
aatcaaattgctcaagcaagacaatcttgtcttcctgaagcagttgaatc

SEQ ID NO: 54009 - DNA, 50 bp, synthetic construct
  source 1..50: mol_type = other DNA
aataaaacaagcttatttagaactgctattgaaaatactctttatctttg

SEQ ID NO: 54010 - DNA, 50 bp, synthetic construct
  source 1..50: mol_type = other DNA
accgtggtacaaaagtttccaataattacaggcagaaaaaagccttaata

SEQ ID NO: 54011 - DNA, 50 bp, synthetic construct
  source 1..50: mol_type = other DNA
ttgccattcttatcatcctttctctgactcaaagcggtaaaatatgccat

SEQ ID NO: 54012 - DNA, 50 bp, synthetic construct
  source 1..50: mol_type = other DNA
ttataatttggtaagctacatttggccacccttatcttcttttcctgtac

SEQ ID NO: 54013 - DNA, 50 bp, synthetic construct
  source 1..50: mol_type = other DNA
ttctcattttgttctgtcataaatatgcagatatcagggaaaaatctaaa

SEQ ID NO: 54014 - DNA, 50 bp, synthetic construct
  source 1..50: mol_type = other DNA
gtttataggcatattatcacctcctttagagtgatatatagactaccaaa

SEQ ID NO: 54015 - DNA, 50 bp, synthetic construct
  source 1..50: mol_type = other DNA
taggctctgaggttattccaacagagttgttatttatgggatggaccgtt

SEQ ID NO: 54016 - DNA, 50 bp, synthetic construct
  source 1..50: mol_type = other DNA
agatattgtcaatcatttactataaacaattttaaataaaaactatacgt

SEQ ID NO: 54017 - DNA, 50 bp, synthetic construct
  source 1..50: mol_type = other DNA
atatattttatctccttataatataaataatatatggatataaactattt

SEQ ID NO: 54018 - DNA, 50 bp, synthetic construct
  source 1..50: mol_type = other DNA
gtgaaaatgtatgtaaaaaagagtattcagttttttcagtttgttttcca

SEQ ID NO: 54019 - DNA, 50 bp, synthetic construct
  source 1..50: mol_type = other DNA
aaatgatgcaatatatgtataatatcaatgctacatttattatagcattg

SEQ ID NO: 54020 - DNA, 50 bp, synthetic construct
  source 1..50: mol_type = other DNA
ccagcatactgctgacggtcttgacgtacaggccgtcctgtgcctttgtc

SEQ ID NO: 54021 - DNA, 50 bp, synthetic construct
  source 1..50: mol_type = other DNA
attaccgatgatgaatacaaagaattttctttgtattctgttaatataaa

SEQ ID NO: 54022 - DNA, 50 bp, synthetic construct
  source 1..50: mol_type = other DNA
tgtgatacctttcacctttcttttcttctgcaaactcatcttttaccaca

SEQ ID NO: 54023 - DNA, 50 bp, synthetic construct
  source 1..50: mol_type = other DNA
tgaaggaagttgataaatatttacctcctttacttgacctgctgccttct

SEQ ID NO: 54024 - DNA, 50 bp, synthetic construct
  source 1..50: mol_type = other DNA
ttttatcaatattgcatgtaccccactagagtcatgggctattggggtcc

SEQ ID NO: 54025 - DNA, 50 bp, synthetic construct
  source 1..50: mol_type = other DNA
tatggatatagaattgaagatggaaaacaatcgtcaattctattttggga

SEQ ID NO: 54026 - DNA, 50 bp, synthetic construct
  source 1..50: mol_type = other DNA
agatttatatgataaaatcgcaagtatttgccgacatatcgttgacttct

SEQ ID NO: 54027 - DNA, 50 bp, synthetic construct
  source 1..50: mol_type = other DNA
acgaatcctactgagtttttttatgaaggaaaaatggactccggagcgaa

SEQ ID NO: 54028 - DNA, 50 bp, synthetic construct
  source 1..50: mol_type = other DNA
cttttgattcgtagtcaaacgctctaaagcgtggttaaatgtatgaaaag

SEQ ID NO: 54029 - DNA, 50 bp, synthetic construct
  source 1..50: mol_type = other DNA
atcacggcaaccgtgatcaaagatatatttatattcagagaaaggatgat

SEQ ID NO: 54030 - DNA, 50 bp, synthetic construct
  source 1..50: mol_type = other DNA
aattcaaaataaaatgtgaaaaaatttttatactcatttttacgtatatt

SEQ ID NO: 54031 - DNA, 50 bp, synthetic construct
  source 1..50: mol_type = other DNA
cacaaaatttgtggaatgtttaatatactaaatataacacaaattcacgt

SEQ ID NO: 54032 - DNA, 50 bp, synthetic construct
  source 1..50: mol_type = other DNA
atacttataaggtgctgtcattgtcactaatctcgcaatattacaagtaa

SEQ ID NO: 54033 - DNA, 50 bp, synthetic construct
  source 1..50: mol_type = other DNA
cgttttccgttccatatgcctttattcatccgcatagacccctgcaaacg

SEQ ID NO: 54034 - DNA, 50 bp, synthetic construct
  source 1..50: mol_type = other DNA
ggtcaagccctcgaccgattagtacagatgaatctttctcctctcgttgc

SEQ ID NO: 54035 - DNA, 50 bp, synthetic construct
  source 1..50: mol_type = other DNA
aacaccttaaaaatacaccttagaaaaatgaaagggatttttacgatgag

SEQ ID NO: 54036 - DNA, 50 bp, synthetic construct
  source 1..50: mol_type = other DNA
ctatgtaattatatgtaaaaaggtattgccgcatagatcatacatcagat

SEQ ID NO: 54037 - DNA, 50 bp, synthetic construct
  source 1..50: mol_type = other DNA
aaacaccccctaccgaatgaatctgcaggtttagagcgtagatggataca

SEQ ID NO: 54038 - DNA, 50 bp, synthetic construct
  source 1..50: mol_type = other DNA
gcaattcctaccccccgtctttggaaccagtgaggggaggttggcatgag

SEQ ID NO: 54039 - DNA, 50 bp, synthetic construct
  source 1..50: mol_type = other DNA
atttttttataaagaaaaagcaactagttgctttaattttataaatcata

SEQ ID NO: 54040 - DNA, 50 bp, synthetic construct
  source 1..50: mol_type = other DNA
aacataagccgtgacaagctggaaaaatccccgttttctgctctaacagg

SEQ ID NO: 54041 - DNA, 50 bp, synthetic construct
  source 1..50: mol_type = other DNA
atctgaattacgatttttctatgcttgcatttccaaatatccatttatgc

SEQ ID NO: 54042 - DNA, 50 bp, synthetic construct
  source 1..50: mol_type = other DNA
agtgtataaccctccgaaaaacggtttgttttatccaagcccaaagcaga

SEQ ID NO: 54043 - DNA, 50 bp, synthetic construct
  source 1..50: mol_type = other DNA
ctttcatttccggtgtccagctttcaaaggctctacacagatattgaatt

SEQ ID NO: 54044 - DNA, 50 bp, synthetic construct
  source 1..50: mol_type = other DNA
gctgagctactgagtctcaaaaaatgattttactgactacgtatttcagc

SEQ ID NO: 54045 - DNA, 50 bp, synthetic construct
  source 1..50: mol_type = other DNA
gggcttttttatcgctgttacaattaattatatcacagggtaatagtgcc

SEQ ID NO: 54046 - DNA, 50 bp, synthetic construct
  source 1..50: mol_type = other DNA
tctccccattcattctatttattttaccctgaaaagtatgatctacatcc

SEQ ID NO: 54047 - DNA, 50 bp, synthetic construct
  source 1..50: mol_type = other DNA
agttgttttttatatgtatggtgtggatggcatacaggaaaataacggat

SEQ ID NO: 54048 - DNA, 50 bp, synthetic construct
  source 1..50: mol_type = other DNA
acttctcgcatgtgctgttttcgctcccttgcagagcaaatgccagaaga

SEQ ID NO: 54049 - DNA, 50 bp, synthetic construct
  source 1..50: mol_type = other DNA
tccgcatgaaatcactcctttccgacgcatcatgagtcatttctaacgga

SEQ ID NO: 54050 - DNA, 50 bp, synthetic construct
  source 1..50: mol_type = other DNA
aggagcaaccgcctgatgattatccgggcacctatcgggcgggcaaccgc

SEQ ID NO: 54051 - DNA, 50 bp, synthetic construct
  source 1..50: mol_type = other DNA
ttgctgcccagtattcttttccagacctgggcttcaaaactgtgaagctg

SEQ ID NO: 54052 - DNA, 50 bp, synthetic construct
  source 1..50: mol_type = other DNA
aggtttttattctagccatagtctacctgctaaaagaagaagaaaaataa

SEQ ID NO: 54053 - DNA, 50 bp, synthetic construct
  source 1..50: mol_type = other DNA
ttagaagatataaatatttatttttaataacaaagatttgcgtctttgtc

SEQ ID NO: 54054 - DNA, 50 bp, synthetic construct
  source 1..50: mol_type = other DNA
gtgcaacgcgcagctgccgtccggcgccgcgcggcatagtacctttgtac

SEQ ID NO: 54055 - DNA, 50 bp, synthetic construct
  source 1..50: mol_type = other DNA
tctctcttgaaaaaataaaatctaatctgattatattttatcgtacttat

SEQ ID NO: 54056 - DNA, 50 bp, synthetic construct
  source 1..50: mol_type = other DNA
tctttaattcacttcttttaaattatagaaagccgggagtgatttcccgg

SEQ ID NO: 54057 - DNA, 50 bp, synthetic construct
  source 1..50: mol_type = other DNA
aacaatcatattcatctgtcattttataagcgagtatgcttttgactgtt

SEQ ID NO: 54058 - DNA, 50 bp, synthetic construct
  source 1..50: mol_type = other DNA
atcatcctttctctgaatataaatatatttatgatgtacttaaacggatg

SEQ ID NO: 54059 - DNA, 50 bp, synthetic construct
  source 1..50: mol_type = other DNA
aatctgcgatacctttcacctttcttgaagactgcaaaaaaggtcagata

SEQ ID NO: 54060 - DNA, 50 bp, synthetic construct
  source 1..50: mol_type = other DNA
tgcgcatgctctgattattaaaattatttttacttaggaggatgatgaca

SEQ ID NO: 54061 - DNA, 50 bp, synthetic construct
  source 1..50: mol_type = other DNA
ttaaagcaactatcaatgatagttgcagctatccatgatagttgcttttt

SEQ ID NO: 54062 - DNA, 50 bp, synthetic construct
  source 1..50: mol_type = other DNA
cgttctaagcccgcgatgtgcgcaaaagtgcgaccacagagccgcgaacg

SEQ ID NO: 54063 - DNA, 50 bp, synthetic construct
  source 1..50: mol_type = other DNA
ctgtgttttttctccatccaacaaatttgttgggtatttatataggaagt

SEQ ID NO: 54064 - DNA, 50 bp, synthetic construct
  source 1..50: mol_type = other DNA
ggcggagttctttatgtctcattctagcatggccaagaaagtaaagcgca

SEQ ID NO: 54065 - DNA, 50 bp, synthetic construct
  source 1..50: mol_type = other DNA
ttgaggcgtttgttctctttctcgatcaggagggaaaagaaatggccgaa

SEQ ID NO: 54066 - DNA, 50 bp, synthetic construct
  source 1..50: mol_type = other DNA
caacgcgatcggataaccgattgctctaccaggggaatcagatcgtgatc

SEQ ID NO: 54067 - DNA, 50 bp, synthetic construct
  source 1..50: mol_type = other DNA
acttctttaggatttacacctaacttgcgagaggtaaagactattatctg

SEQ ID NO: 54068 - DNA, 50 bp, synthetic construct
  source 1..50: mol_type = other DNA
atgtcgtcaatgaccttgtattcaccccatacgccttatcctgctgaagg

SEQ ID NO: 54069 - DNA, 50 bp, synthetic construct
  source 1..50: mol_type = other DNA
tctggcggtcagaagagtatcgggcggttaatactttttattccgcccgg

SEQ ID NO: 54070 - DNA, 50 bp, synthetic construct
  source 1..50: mol_type = other DNA
gccagaagtaaagagaaaaatattgaatgccatttatctgtatgacgatc

SEQ ID NO: 54071 - DNA, 50 bp, synthetic construct
  source 1..50: mol_type = other DNA
cctatgcccgcgtctccacctccagctggccgtgatgtcgtcggcacacg

SEQ ID NO: 54072 - DNA, 50 bp, synthetic construct
  source 1..50: mol_type = other DNA
tatctactatacaaattcaagaattataacatatatacataatatagata

SEQ ID NO: 54073 - DNA, 50 bp, synthetic construct
  source 1..50: mol_type = other DNA
ctttcaaacttgtttttaataaattaatgatacaaaatcaagacagaatt

SEQ ID NO: 54074 - DNA, 50 bp, synthetic construct
  source 1..50: mol_type = other DNA
gttgcaagttctggggaaaataaatcttttccggggtaaggacgtacttt

SEQ ID NO: 54075 - DNA, 50 bp, synthetic construct
  source 1..50: mol_type = other DNA
aagtagccggtgtggaatatgtcatgaaatacattccataatagtaaagg

SEQ ID NO: 54076 - DNA, 50 bp, synthetic construct
  source 1..50: mol_type = other DNA
ggtgggaaatggcggactgcgtcacgttacggctcttgccatttctcacc

SEQ ID NO: 54077 - DNA, 50 bp, synthetic construct
  source 1..50: mol_type = other DNA
ggatgaaaggttatgagctcgagtggatagcaacaagtaacctttcggcc

SEQ ID NO: 54078 - DNA, 50 bp, synthetic construct
  source 1..50: mol_type = other DNA
gaaaatcaggcggctaaaatcttatctgggttttgagcccagatcttttt

SEQ ID NO: 54079 - DNA, 50 bp, synthetic construct
  source 1..50: mol_type = other DNA
ccatagtatatcactcctttatatttctatacatacttcttccacacata

SEQ ID NO: 54080 - DNA, 50 bp, synthetic construct
  source 1..50: mol_type = other DNA
agattgtatcaagttcagtgtgccaattatggcgaatatacgaagaatcg

SEQ ID NO: 54081 - DNA, 50 bp, synthetic construct
  source 1..50: mol_type = other DNA
ctgttgagagcattgcaacagatacaattggaatgaaatagccgagaaat

SEQ ID NO: 54082 - DNA, 50 bp, synthetic construct
  source 1..50: mol_type = other DNA
gaaaatacaaaaaatgttatcacaataccgacatcattttttgtatataa

SEQ ID NO: 54083 - DNA, 50 bp, synthetic construct
  source 1..50: mol_type = other DNA
atgttgacggcaacggaacggttgcgcaaggcaaaaccggggaaccacgc

SEQ ID NO: 54084 - DNA, 50 bp, synthetic construct
  source 1..50: mol_type = other DNA
cagccatgtacgtgctttatgagtagcgattatatgcgcgtaaatgaaac

SEQ ID NO: 54085 - DNA, 50 bp, synthetic construct
  source 1..50: mol_type = other DNA
tgggaaagctatggtgcaatgaggaaaaccattcaccggatggttttttg

SEQ ID NO: 54086 - DNA, 50 bp, synthetic construct
  source 1..50: mol_type = other DNA
cacacctgtatattaaatgctaagtaaagagtctttattttctggttttg

SEQ ID NO: 54087 - DNA, 50 bp, synthetic construct
  source 1..50: mol_type = other DNA
atcgcggatggtaacttcattctttcttgccatttaccgtcatccggtga

SEQ ID NO: 54088 - DNA, 50 bp, synthetic construct
  source 1..50: mol_type = other DNA
cataaatacctccagcctcaggataaaaaatgaggagggctgtgattatg

SEQ ID NO: 54089 - DNA, 50 bp, synthetic construct
  source 1..50: mol_type = other DNA
atttttttgtgattgttatactactagtagtatgaaaatctctgttattt

SEQ ID NO: 54090 - DNA, 50 bp, synthetic construct
  source 1..50: mol_type = other DNA
aggaagacgaactcattgtgataggcctgcgtcaacgccgtcggcgtcga

SEQ ID NO: 54091 - DNA, 50 bp, synthetic construct
  source 1..50: mol_type = other DNA
aaatgataccggcatgaatgtcgggaacatagttcattttttcatcattg

SEQ ID NO: 54092 - DNA, 50 bp, synthetic construct
  source 1..50: mol_type = other DNA
tattgtggttacggatttggccatttatcgccaaagggcgaacagctata

SEQ ID NO: 54093 - DNA, 50 bp, synthetic construct
  source 1..50: mol_type = other DNA
tttgttgttcgacaaaccggaattgcgtcgccggtattgtggttacggat

SEQ ID NO: 54094 - DNA, 50 bp, synthetic construct
  source 1..50: mol_type = other DNA
tcatttcaggcgtccagctttctgctctttccgctgtactggcggctgat

SEQ ID NO: 54095 - DNA, 50 bp, synthetic construct
  source 1..50: mol_type = other DNA
tcagcggaatatactacacgaagatataccgattatacagcatatttaga

SEQ ID NO: 54096 - DNA, 50 bp, synthetic construct
  source 1..50: mol_type = other DNA
atcttattaagtcagccaatatacatgtgaggttatcccagaaatcagga

SEQ ID NO: 54097 - DNA, 50 bp, synthetic construct
  source 1..50: mol_type = other DNA
gataaataaagtgcgtgcagtcgttgagagcttcgagaacattatcaata

SEQ ID NO: 54098 - DNA, 50 bp, synthetic construct
  source 1..50: mol_type = other DNA
tttttcagcaatcgaatgccttcggttttcggcactcatttgttaaaaaa

SEQ ID NO: 54099 - DNA, 50 bp, synthetic construct
  source 1..50: mol_type = other DNA
atcagcaggtacacagccacgccgatctacctgtttatataccggaagat

SEQ ID NO: 54100 - DNA, 50 bp, synthetic construct
  source 1..50: mol_type = other DNA
ttttgttatgggattgaaaaatagtgagatgattgaagaacatgcaaaaa

SEQ ID NO: 54101 - DNA, 50 bp, synthetic construct
  source 1..50: mol_type = other DNA
ttacagaaatcattgaaaaatatcaggatttcttgttatgatttccgtat

SEQ ID NO: 54102 - DNA, 50 bp, synthetic construct
  source 1..50: mol_type = other DNA
gtgggcggtcttccgcgatatattttcaggtatcgcgcaactgtatcata

SEQ ID NO: 54103 - DNA, 50 bp, synthetic construct
  source 1..50: mol_type = other DNA
gtgcggggctgcttttctgttatgcacaccgtttcaatgttgtcccgcag

SEQ ID NO: 54104 - DNA, 50 bp, synthetic construct
  source 1..50: mol_type = other DNA
gaaaacggcggcgcgcgagcagaagcttctgctcccgcaatcggtaatcc

SEQ ID NO: 54105 - DNA, 50 bp, synthetic construct
  source 1..50: mol_type = other DNA
agacaatttgcgttccgatttaccatggtatatccaaaaggtatatggct

SEQ ID NO: 54106 - DNA, 50 bp, synthetic construct
  source 1..50: mol_type = other DNA
ttcatgctcactataagacaaatgattttttgtcaataggttagcaccaa

SEQ ID NO: 54107 - DNA, 50 bp, synthetic construct
  source 1..50: mol_type = other DNA
agaaaacgggagaggtcagtattcatgaaaggacttctctgtgtaattct

SEQ ID NO: 54108 - DNA, 50 bp, synthetic construct
  source 1..50: mol_type = other DNA
accaagtggtcttgccacttatcattctggggtataattcctacattggg

SEQ ID NO: 54109 - DNA, 50 bp, synthetic construct
  source 1..50: mol_type = other DNA
aaaatgaattataacagattgtggaagacttgctcattaaaatttgagca

SEQ ID NO: 54110 - DNA, 50 bp, synthetic construct
  source 1..50: mol_type = other DNA
gcataaagcaaaaaccccacttccgatgaagtggccgccgagctgcgggc

SEQ ID NO: 54111 - DNA, 50 bp, synthetic construct
  source 1..50: mol_type = other DNA
tgctgtccccacgggtagagtaatgcaccactcttcctacatcttcagca

SEQ ID NO: 54112 - DNA, 50 bp, synthetic construct
  source 1..50: mol_type = other DNA
aacatatgagaggtaggtaaatctaaggatttactcttctcttatagaaa

SEQ ID NO: 54113 - DNA, 50 bp, synthetic construct
  source 1..50: mol_type = other DNA
catctggaccggatgtacatggaccggctgcggtacaaccgagccgatga

SEQ ID NO: 54114 - DNA, 50 bp, synthetic construct
  source 1..50: mol_type = other DNA
tttatttcattattttatatgatatattagttgcaaaaagttttaatgag

SEQ ID NO: 54115 - DNA, 50 bp, synthetic construct
  source 1..50: mol_type = other DNA
cgttatctgccttatttgtctttatagaaatcattacaaggcagattgtt

SEQ ID NO: 54116 - DNA, 50 bp, synthetic construct
  source 1..50: mol_type = other DNA
tattttaaatttactgtgcaggaaatgacaatgccggaagcattaaacgc

SEQ ID NO: 54117 - DNA, 50 bp, synthetic construct
  source 1..50: mol_type = other DNA
aatgctacgctcaccgttttatcgacaaggcagattgttaaaatcatcat

SEQ ID NO: 54118 - DNA, 50 bp, synthetic construct
  source 1..50: mol_type = other DNA
ccctgataacggagtcaggtatccttacatacctgcatccggcatcatac

SEQ ID NO: 54119 - DNA, 50 bp, synthetic construct
  source 1..50: mol_type = other DNA
agccaataatagcaagtacaatctgcggattctacgcactgtagagtatg

SEQ ID NO: 54120 - DNA, 50 bp, synthetic construct
  source 1..50: mol_type = other DNA
agatattcagaatcagaaacagattacaactccgaggatagataatatcc

SEQ ID NO: 54121 - DNA, 50 bp, synthetic construct
  source 1..50: mol_type = other DNA
gcaggcggtgttgtacgtttcaacgccgtccgcggtaaagcaggaagtgc

SEQ ID NO: 54122 - DNA, 50 bp, synthetic construct
  source 1..50: mol_type = other DNA
acagaaaacaaattatcgcagactgcagatgcacgctgcgccttttttgt

SEQ ID NO: 54123 - DNA, 50 bp, synthetic construct
  source 1..50: mol_type = other DNA
gggtcgccccgccgtttttggggcgggtaacaacggcggcggggattacc

SEQ ID NO: 54124 - DNA, 50 bp, synthetic construct
  source 1..50: mol_type = other DNA
tgaacacgggccgaatggcaagaattataccctttttcggcgcctgggga

SEQ ID NO: 54125 - DNA, 50 bp, synthetic construct
  source 1..50: mol_type = other DNA
agatgagtacattgaagtgaaagcaacatttcaatacacaaaatcacatt

SEQ ID NO: 54126 - DNA, 50 bp, synthetic construct
  source 1..50: mol_type = other DNA
ttcattttcccaacgctctatcccttcagcaagggagttttgcaaataaa

SEQ ID NO: 54127 - DNA, 50 bp, synthetic construct
  source 1..50: mol_type = other DNA
gtcaattcggaggaataaattgaacgtttcagcgtttcctccgggatgac

SEQ ID NO: 54128 - DNA, 50 bp, synthetic construct
  source 1..50: mol_type = other DNA
ccctttcttacttcaatatcacactgtggtgatattatgagaaacaagga

SEQ ID NO: 54129 - DNA, 50 bp, synthetic construct
  source 1..50: mol_type = other DNA
cttcggctaccgtatgacgctgggcgtccactgtcccggcgtaggtaaag

SEQ ID NO: 54130 - DNA, 50 bp, synthetic construct
  source 1..50: mol_type = other DNA
ggctatacaataaatagtgctattcaaacagcacgcagtatttcccgccc

SEQ ID NO: 54131 - DNA, 50 bp, synthetic construct
  source 1..50: mol_type = other DNA
gcatccgtttaagtacatcataaatatttatattcagagaaaggatgata

SEQ ID NO: 54132 - DNA, 50 bp, synthetic construct
  source 1..50: mol_type = other DNA
gaaatatgattctgctcccttacttcagtaatggctgtcagccgtatttt

SEQ ID NO: 54133 - DNA, 50 bp, synthetic construct
  source 1..50: mol_type = other DNA
gagcagcatatttgtttagagccgccaaacaactaaacaaaaagctgcct

SEQ ID NO: 54134 - DNA, 50 bp, synthetic construct
  source 1..50: mol_type = other DNA
gagatatcataactgttcatattgcataatctgaacaattgtccgccgtc

SEQ ID NO: 54135 - DNA, 50 bp, synthetic construct
  source 1..50: mol_type = other DNA
acaagtcttgtcccggtacatatctccttatgtaaaaaagcaagacgcaa

SEQ ID NO: 54136 - DNA, 50 bp, synthetic construct
  source 1..50: mol_type = other DNA
ttggtgctaacctattgacaaaaaatcatttgtcttatagtgagcatgaa

SEQ ID NO: 54137 - DNA, 50 bp, synthetic construct
  source 1..50: mol_type = other DNA
gcacttcctgctttaccgcggacggcgttgaaacgtacaacaccgcctgc

SEQ ID NO: 54138 - DNA, 50 bp, synthetic construct
  source 1..50: mol_type = other DNA
ccgggctgcccattatcgtagctgcgcaggatagggcgtgggaagccatg

SEQ ID NO: 54139 - DNA, 50 bp, synthetic construct
  source 1..50: mol_type = other DNA
agcgatccagtagctctggaaatcgccgttgccattatgactcctccttc

SEQ ID NO: 54140 - DNA, 50 bp, synthetic construct
  source 1..50: mol_type = other DNA
gttccatttgctttctcagcgggaagttggtctttcaacgccgggatgat

SEQ ID NO: 54141 - DNA, 50 bp, synthetic construct
  source 1..50: mol_type = other DNA
taccaaaaccgtaaccttaaccaaaattggtgctcaatgccgtttttgaa

SEQ ID NO: 54142 - DNA, 50 bp, synthetic construct
  source 1..50: mol_type = other DNA
actcaatacgaggcgcatacatagaaaggcagaagctctgcgtattgcag

SEQ ID NO: 54143 - DNA, 50 bp, synthetic construct
  source 1..50: mol_type = other DNA
tggccaaatccgtaaccacaattccggcattgtggacgccgactgcaatc

SEQ ID NO: 54144 - DNA, 50 bp, synthetic construct
  source 1..50: mol_type = other DNA
agcataaccccatagacgcagaaacgtcggtgctgtcctgggcctcggaa

SEQ ID NO: 54145 - DNA, 50 bp, synthetic construct
  source 1..50: mol_type = other DNA
aaaaaagaatactgcaaggatcaaatttactcatatctgatttcctgctc

SEQ ID NO: 54146 - DNA, 50 bp, synthetic construct
  source 1..50: mol_type = other DNA
cttttttcattatatctagcgttatttaacatttgattatgtgaacaaat

SEQ ID NO: 54147 - DNA, 50 bp, synthetic construct
  source 1..50: mol_type = other DNA
attcagttgtttttccggtatgggatcatatatataggaagtaatccagt

SEQ ID NO: 54148 - DNA, 50 bp, synthetic construct
  source 1..50: mol_type = other DNA
actagaatatttaaaactactaactctgtacacttgtttttgaatctagt

SEQ ID NO: 54149 - DNA, 50 bp, synthetic construct
  source 1..50: mol_type = other DNA
cggggcgcttgtgcgccccgcgcccgggagcttggaaaatttgcgcccgc

SEQ ID NO: 54150 - DNA, 50 bp, synthetic construct
  source 1..50: mol_type = other DNA
accgccacaatcataataaaccgctcgcatatttttatgatttcggcagc

SEQ ID NO: 54151 - DNA, 50 bp, synthetic construct
  source 1..50: mol_type = other DNA
ttcgtcgtcatggactacggcgtgatcggaaaattatcttttaccctttc

SEQ ID NO: 54152 - DNA, 50 bp, synthetic construct
  source 1..50: mol_type = other DNA
tgttgtactaatgtgacactacccgtgggctgtgttaagttagtacaaaa

SEQ ID NO: 54153 - DNA, 50 bp, synthetic construct
  source 1..50: mol_type = other DNA
gcaattgttcggtcatatcccggtatataccgattatacagcatatttag

SEQ ID NO: 54154 - DNA, 50 bp, synthetic construct
  source 1..50: mol_type = other DNA
ccagcactttccagatacgcgatatgtacagccaccctggaaaggtgcgt

SEQ ID NO: 54155 - DNA, 50 bp, synthetic construct
  source 1..50: mol_type = other DNA
aaatttattaaaaaatgataaaataggttttagttgtaatttgcgaattt

SEQ ID NO: 54156 - DNA, 50 bp, synthetic construct
  source 1..50: mol_type = other DNA
gttcagcactgcccaaacgacatttttctgactttgacaggcagcgtaac

SEQ ID NO: 54157 - DNA, 50 bp, synthetic construct
  source 1..50: mol_type = other DNA
atctttatataaacataatcttattttatggagtaattttatataatgat

SEQ ID NO: 54158 - DNA, 50 bp, synthetic construct
  source 1..50: mol_type = other DNA
ttacagttccttgtcggggtaaccaatattaaccgccaaagggtgctagc

SEQ ID NO: 54159 - DNA, 50 bp, synthetic construct
  source 1..50: mol_type = other DNA
tttagggcataatccgagccagatagattctgctttttttattgccagct

SEQ ID NO: 54160 - DNA, 50 bp, synthetic construct
  source 1..50: mol_type = other DNA
agataatgataactgaagaaaaagcagctggaggatcagagccagtatca

SEQ ID NO: 54161 - DNA, 50 bp, synthetic construct
  source 1..50: mol_type = other DNA
atacggatacaccatccgtgaagggccctcgaaggaaatggcatgggtcg

SEQ ID NO: 54162 - DNA, 50 bp, synthetic construct
  source 1..50: mol_type = other DNA
ggacatagataccaggcaatccatcttctccgaccttgtagactatgtca

SEQ ID NO: 54163 - DNA, 50 bp, synthetic construct
  source 1..50: mol_type = other DNA
ttgcatagctcacccacaagcacataccggctttcgcatggctgcggcag

SEQ ID NO: 54164 - DNA, 50 bp, synthetic construct
  source 1..50: mol_type = other DNA
gccttttgagctgatcggggccgacgtttgaaccgaatacagcaaaaggc

SEQ ID NO: 54165 - DNA, 50 bp, synthetic construct
  source 1..50: mol_type = other DNA
tctggttaatgttttttgagaagccgggggctgatgttacatcccggagt

SEQ ID NO: 54166 - DNA, 50 bp, synthetic construct
  source 1..50: mol_type = other DNA
ctattaaatgcacaggaaacttttttaacattttcaccctcaattatacc

SEQ ID NO: 54167 - DNA, 50 bp, synthetic construct
  source 1..50: mol_type = other DNA
ataggtagctttagcttcattggtcacacagttaacatgaaacataatac

SEQ ID NO: 54168 - DNA, 50 bp, synthetic construct
  source 1..50: mol_type = other DNA
taaagcccttatttatcaagtctttaccctgatgatagatatgggcacca

SEQ ID NO: 54169 - DNA, 50 bp, synthetic construct
  source 1..50: mol_type = other DNA
tttttaaaaattgtgtttgtcataaaaatcgggtactgaattttgaaaaa

SEQ ID NO: 54170 - DNA, 50 bp, synthetic construct
  source 1..50: mol_type = other DNA
tgatgttgttgaactaatggctgaccgcaataccgttttctattttataa

SEQ ID NO: 54171 - DNA, 50 bp, synthetic construct
  source 1..50: mol_type = other DNA
tcatgctggcaatcgacgtactgattccataagggcgattttgaggcgca

SEQ ID NO: 54172 - DNA, 50 bp, synthetic construct
  source 1..50: mol_type = other DNA
atggcatattttaccgctttgagtcagagaaaggatgataagaatggcaa

SEQ ID NO: 54173 - DNA, 50 bp, synthetic construct
  source 1..50: mol_type = other DNA
taaagagagtactatatatgaaaacagagtgatatatagactaccaaaac

SEQ ID NO: 54174 - DNA, 50 bp, synthetic construct
  source 1..50: mol_type = other DNA
ccttgtcggtccattcataaatgctgccgatcatgataaaaccgacaagc

SEQ ID NO: 54175 - DNA, 50 bp, synthetic construct
  source 1..50: mol_type = other DNA
tgccctgttcttccagacggaaggatcttgacatctaacgaaacagaatg

SEQ ID NO: 54176 - DNA, 50 bp, synthetic construct
  source 1..50: mol_type = other DNA
aaaaacgctcccaaaatagcgggggcccctctacaccgccacgcaaaact

SEQ ID NO: 54177 - DNA, 50 bp, synthetic construct
  source 1..50: mol_type = other DNA
agaccttatcatcggcagcgatgtgacatcattttttgtatataaaagta

SEQ ID NO: 54178 - DNA, 50 bp, synthetic construct
  source 1..50: mol_type = other DNA
atttttgtggattttcaaggtcacttgcaacggcttgcaacaagcttaaa

SEQ ID NO: 54179 - DNA, 50 bp, synthetic construct
  source 1..50: mol_type = other DNA
gtaagaaacagcggcggtgatgtagcctccgagccgatatggttcggagg

SEQ ID NO: 54180 - DNA, 50 bp, synthetic construct
  source 1..50: mol_type = other DNA
ggagcgggcttttttatttattttacaattgccgcatataagctttgatg

SEQ ID NO: 54181 - DNA, 50 bp, synthetic construct
  source 1..50: mol_type = other DNA
atttcaggcgtccagctttctgctctttctgaaagccgtaagcaagaaat

SEQ ID NO: 54182 - DNA, 50 bp, synthetic construct
  source 1..50: mol_type = other DNA
catacctgccaccgcctatccaagcggattgatggtcggcggaatgactg

SEQ ID NO: 54183 - DNA, 50 bp, synthetic construct
  source 1..50: mol_type = other DNA
tattctctcgttaaaacagggagaattctctccatttttagccgagatta

SEQ ID NO: 54184 - DNA, 50 bp, synthetic construct
  source 1..50: mol_type = other DNA
agtgggttttgtattattttcaccattatacaccaaatgaagaaccctgt

SEQ ID NO: 54185 - DNA, 50 bp, synthetic construct
  source 1..50: mol_type = other DNA
ccttactttttcagcgtaaaagaaatatttgtatgtagaaaaaagtaaag

SEQ ID NO: 54186 - DNA, 50 bp, synthetic construct
  source 1..50: mol_type = other DNA
tctaaagctaaaataaggccctctaaatgcttccgtgatttagtcatagt

SEQ ID NO: 54187 - DNA, 50 bp, synthetic construct
  source 1..50: mol_type = other DNA
gaaagggtaaaagataattttccgatcacgccgtagtccatgacgacgaa

SEQ ID NO: 54188 - DNA, 50 bp, synthetic construct
  source 1..50: mol_type = other DNA
tattttaattgagcgcaccttattataaggtcaagcggtaaaggaaaatc

SEQ ID NO: 54189 - DNA, 50 bp, synthetic construct
  source 1..50: mol_type = other DNA
catcataccgaaaaaaatcggttttaaaagcggaaaaatgtatactgttt

SEQ ID NO: 54190 - DNA, 50 bp, synthetic construct
  source 1..50: mol_type = other DNA
ttgcccgcagaactctgcaaaatgcaatgttggcaatatgcttcgttgaa

SEQ ID NO: 54191 - DNA, 50 bp, synthetic construct
  source 1..50: mol_type = other DNA
tgctcatttctttttcctccttgcctgcacggtagagcgtgaaatgtcca

SEQ ID NO: 54192 - DNA, 50 bp, synthetic construct
  source 1..50: mol_type = other DNA
ggagtacaacttcacggacggtcgtgtgaccgaccgtgctgctgttctgc

SEQ ID NO: 54193 - DNA, 50 bp, synthetic construct
  source 1..50: mol_type = other DNA
actggattacttcctatatatatgatcccataccggaaaaacaactgaat

SEQ ID NO: 54194 - DNA, 50 bp, synthetic construct
  source 1..50: mol_type = other DNA
taagtgtgggctggattcaattcgttggaatcgggagaatccctcactta

SEQ ID NO: 54195 - DNA, 50 bp, synthetic construct
  source 1..50: mol_type = other DNA
aacagaaaaagcccctattcggggctcaatcgtagagaactttttctttg

SEQ ID NO: 54196 - DNA, 50 bp, synthetic construct
  source 1..50: mol_type = other DNA
ttatggtactccagaagctctctacgcaaagagaatctggtcctctgtaa

SEQ ID NO: 54197 - DNA, 50 bp, synthetic construct
  source 1..50: mol_type = other DNA
attctcatttatatgtctcctttttgacaaggagagatataaatggaatt

SEQ ID NO: 54198 - DNA, 50 bp, synthetic construct
  source 1..50: mol_type = other DNA
gtaagccatcctgtacactcctttataattccgtatcctgcgccttctac

SEQ ID NO: 54199 - DNA, 50 bp, synthetic construct
  source 1..50: mol_type = other DNA
gaaggcggacagcggcaatttctataaggacaccaacgataacggcgagc

SEQ ID NO: 54200 - DNA, 50 bp, synthetic construct
  source 1..50: mol_type = other DNA
gaaaccatgctggaacaggaagtgtgcacttcctgccggacgtctacgtc

SEQ ID NO: 54201 - DNA, 50 bp, synthetic construct
  source 1..50: mol_type = other DNA
ctgagctacgaggccaacaacaatattttgtccttggcttatgagatagt

SEQ ID NO: 54202 - DNA, 50 bp, synthetic construct
  source 1..50: mol_type = other DNA
acagtctgtgcttgcccgccttgtctggtactgcggtactgccgccctgt

SEQ ID NO: 54203 - DNA, 50 bp, synthetic construct
  source 1..50: mol_type = other DNA
aggcattggatggcagattctggtggaacagaaattacgatccgcgatct

SEQ ID NO: 54204 - DNA, 50 bp, synthetic construct
  source 1..50: mol_type = other DNA
tattattctaacacagcattcggatgatataattggctttcagagtgata

SEQ ID NO: 54205 - DNA, 50 bp, synthetic construct
  source 1..50: mol_type = other DNA
ttgccctgtgcgtctgcatcaatgagtaatgatacagaaatggagggaaa

SEQ ID NO: 54206 - DNA, 50 bp, synthetic construct
  source 1..50: mol_type = other DNA
gctgaaaagtggcgtatttccaggcttctggcggaacaaaaatttgaagc

SEQ ID NO: 54207 - DNA, 50 bp, synthetic construct
  source 1..50: mol_type = other DNA
cgtaaatggtaaaaagtggtattttatgacaccgttttctaacatttgtt

SEQ ID NO: 54208 - DNA, 50 bp, synthetic construct
  source 1..50: mol_type = other DNA
cgttggatttattaatgaagatatcgaaacttcccgctgagaaaacaaat

SEQ ID NO: 54209 - DNA, 50 bp, synthetic construct
  source 1..50: mol_type = other DNA
gctgcttatcgatcggggtatgaagactcacgcctcgatttctgtaccgc

SEQ ID NO: 54210 - DNA, 50 bp, synthetic construct
  source 1..50: mol_type = other DNA
caacgtgatcgcatctacgggcgaatcgtcacgcagcatccgctacaatg

SEQ ID NO: 54211 - DNA, 50 bp, synthetic construct
  source 1..50: mol_type = other DNA
gaaagtcaagcactttctcggaaaattttgaattggaatgccagactttc

SEQ ID NO: 54212 - DNA, 50 bp, synthetic construct
  source 1..50: mol_type = other DNA
tacaacattccctccgcgtcacgccgggtgaacgcgctgtccttgttgta

SEQ ID NO: 54213 - DNA, 50 bp, synthetic construct
  source 1..50: mol_type = other DNA
cccttcaaaggttccgttgcagaaatacctgcaagataattccggaaaag

SEQ ID NO: 54214 - DNA, 50 bp, synthetic construct
  source 1..50: mol_type = other DNA
tacttactgccatggcgctgggcatgccgccagcgtatcatgtgtcaaaa

SEQ ID NO: 54215 - DNA, 50 bp, synthetic construct
  source 1..50: mol_type = other DNA
tggtctttctcaacattaagcttgtttgttgcaaatgggttgaaacacaa

SEQ ID NO: 54216 - DNA, 50 bp, synthetic construct
  source 1..50: mol_type = other DNA
tcgccatgatgacctcctgcacagtgccatgcgcggcgtcatttatgcga

SEQ ID NO: 54217 - DNA, 50 bp, synthetic construct
  source 1..50: mol_type = other DNA
agaaaagtggcaaagacagtaagggctatacctgcttttccctgacgaca

SEQ ID NO: 54218 - DNA, 50 bp, synthetic construct
  source 1..50: mol_type = other DNA
gatttcgccgtcgtaaatgcggcggcctacgccatccaagcggcgtccca

SEQ ID NO: 54219 - DNA, 50 bp, synthetic construct
  source 1..50: mol_type = other DNA
atgcggaacgcggatgccgtgcgttccgcggcggcatcgatggcccgcat

SEQ ID NO: 54220 - DNA, 50 bp, synthetic construct
  source 1..50: mol_type = other DNA
gatacaaaactgaactgcataaatctattattggctttcagagtgatata

SEQ ID NO: 54221 - DNA, 50 bp, synthetic construct
  source 1..50: mol_type = other DNA
agcatctcggtcgttttcggttttgataaggcccagcaatgagaaagaag

SEQ ID NO: 54222 - DNA, 50 bp, synthetic construct
  source 1..50: mol_type = other DNA
cttatctttttcatggtctcgctcatgtcagagactgagaaaaaacgcag

SEQ ID NO: 54223 - DNA, 50 bp, synthetic construct
  source 1..50: mol_type = other DNA
ccgacgcagaaattggccggatgaagccacccggcgctttttctgctccg

SEQ ID NO: 54224 - DNA, 50 bp, synthetic construct
  source 1..50: mol_type = other DNA
gtcttgcggcggatgcaggtacagcgcatccgcagcaaccttgagtaggg

SEQ ID NO: 54225 - DNA, 50 bp, synthetic construct
  source 1..50: mol_type = other DNA
tacggcagtaacgataaaaagctatcctgcgtttcctcttggattctctg

SEQ ID NO: 54226 - DNA, 50 bp, synthetic construct
  source 1..50: mol_type = other DNA
caaacttacctgctttgtactggttaataatgctggtacaggtaatgttt

SEQ ID NO: 54227 - DNA, 50 bp, synthetic construct
  source 1..50: mol_type = other DNA
tctttttttgttcttctttgtctaaaacaacaaagaaaaactgaaatgac

SEQ ID NO: 54228 - DNA, 50 bp, synthetic construct
  source 1..50: mol_type = other DNA
aattgatatacaagtgattctattttaattatatcacttaaaggaacatt

SEQ ID NO: 54229 - DNA, 50 bp, synthetic construct
  source 1..50: mol_type = other DNA
tatttatttgtaatggacttaataaacagacaggtaggaattttgaacgc

SEQ ID NO: 54230 - DNA, 50 bp, synthetic construct
  source 1..50: mol_type = other DNA
tattagcgaaaaaaaatagcttataaatgtgctttttatttattctaaat

SEQ ID NO: 54231 - DNA, 50 bp, synthetic construct
  source 1..50: mol_type = other DNA
caatggcttttggggttttagaagaatttgaaatgtagcaaatagatgta

SEQ ID NO: 54232 - DNA, 50 bp, synthetic construct
  source 1..50: mol_type = other DNA
agaatctttattggttgcaatacaactgtattgcgacctaatagcaaact

SEQ ID NO: 54233 - DNA, 50 bp, synthetic construct
  source 1..50: mol_type = other DNA
ttaaatactatacaggataagccttaagcaccctatattatagcagagaa

SEQ ID NO: 54234 - DNA, 50 bp, synthetic construct
  source 1..50: mol_type = other DNA
aaattgacacgatatgttctattctattatagcataagccccctaaattt

SEQ ID NO: 54235 - DNA, 50 bp, synthetic construct
  source 1..50: mol_type = other DNA
atccttccggtataaagggggttgtccaaccgtctattatattcatctcg

SEQ ID NO: 54236 - DNA, 50 bp, synthetic construct
  source 1..50: mol_type = other DNA
cagcagcttcatgaaaatggagagcagaggtgttttctatgaagatagca

SEQ ID NO: 54237 - DNA, 50 bp, synthetic construct
  source 1..50: mol_type = other DNA
aatactatattattactttctttaaggaaagaaagaaaaaagatgaactt

SEQ ID NO: 54238 - DNA, 50 bp, synthetic construct
  source 1..50: mol_type = other DNA
gtttaatcaataataatttctataattaaagaaataatattggatagaac

SEQ ID NO: 54239 - DNA, 50 bp, synthetic construct
  source 1..50: mol_type = other DNA
acattttataaagctcagactcttctaaatgttataggcttttaaaatat

SEQ ID NO: 54240 - DNA, 50 bp, synthetic construct
  source 1..50: mol_type = other DNA
taattatctaatttattaaacttaatgaaaattaaaaaaactgataaaaa

SEQ ID NO: 54241 - DNA, 50 bp, synthetic construct
  source 1..50: mol_type = other DNA
gaattataaattatttcatcttccatttataatagattatagattaaaaa

SEQ ID NO: 54242 - DNA, 50 bp, synthetic construct
  source 1..50: mol_type = other DNA
gtatggcgaggcacattgcaacaaaattccaatgatgtgttacacactca

SEQ ID NO: 54243 - DNA, 50 bp, synthetic construct
  source 1..50: mol_type = other DNA
gaggaatcctcatttcaacgctacaatcaccggcttgccgttctcgattc

SEQ ID NO: 54244 - DNA, 50 bp, synthetic construct
  source 1..50: mol_type = other DNA
ctatattggcatgaccgtgaaaaagcacttttacgggaatatgtccatac

SEQ ID NO: 54245 - DNA, 50 bp, synthetic construct
  source 1..50: mol_type = other DNA
attggcatgaccgtgaaaaagctgtacacatttttcattaaaggaagttc

SEQ ID NO: 54246 - DNA, 50 bp, synthetic construct
  source 1..50: mol_type = other DNA
tttttcggtgtgtatttgctaaagacgattggaattggctaacccataaa

SEQ ID NO: 54247 - DNA, 50 bp, synthetic construct
  source 1..50: mol_type = other DNA
gtaggtggtgctgggatacacaccggctgcgacattccagcgccacctac

SEQ ID NO: 54248 - DNA, 50 bp, synthetic construct
  source 1..50: mol_type = other DNA
tttcaaaagtgaatacagaaatattgctttttctgtattgagctatgaag

SEQ ID NO: 54249 - DNA, 50 bp, synthetic construct
  source 1..50: mol_type = other DNA
agtaatcagctcaaggtctgcatccggaagcagaatttacagcaaagaaa

SEQ ID NO: 54250 - DNA, 50 bp, synthetic construct
  source 1..50: mol_type = other DNA
gattgttcatttcattcattttcgatggaaaatgtttgaggtgaaagagc

SEQ ID NO: 54251 - DNA, 50 bp, synthetic construct
  source 1..50: mol_type = other DNA
tagaggagaaaaaggtacaattcatataattttcccctaaaaaatgagga

SEQ ID NO: 54252 - DNA, 50 bp, synthetic construct
  source 1..50: mol_type = other DNA
aggaagaacagttgaacagttttgaaaaaagaaacgggcctgaaagcatt

SEQ ID NO: 54253 - DNA, 50 bp, synthetic construct
  source 1..50: mol_type = other DNA
atgaccataacatttcccattagatctcatccgggcaaaacaatcctttt

SEQ ID NO: 54254 - DNA, 50 bp, synthetic construct
  source 1..50: mol_type = other DNA
aaagctctccggaatcagcgccagttctcgtataggttcctgattttggc

SEQ ID NO: 54255 - DNA, 50 bp, synthetic construct
  source 1..50: mol_type = other DNA
tcgacataaccaaactctttaatggacattcctgaacctggggatgcgga

SEQ ID NO: 54256 - DNA, 50 bp, synthetic construct
  source 1..50: mol_type = other DNA
gtctatatatcactctgaaagccaataaattttccgggtgttttgtacat

SEQ ID NO: 54257 - DNA, 50 bp, synthetic construct
  source 1..50: mol_type = other DNA
gctcttgtagatcacatcacggtatttagagtgatgtatagacacggaaa

SEQ ID NO: 54258 - DNA, 50 bp, synthetic construct
  source 1..50: mol_type = other DNA
acttcgccggaagaggcggcaatagaaattgtaaagtattacggcgagtt

SEQ ID NO: 54259 - DNA, 50 bp, synthetic construct
  source 1..50: mol_type = other DNA
gttttcctgtcacctcattccgactagaatgaaacgacaaacagctaaac

SEQ ID NO: 54260 - DNA, 50 bp, synthetic construct
  source 1..50: mol_type = other DNA
tttttgtgctttatttttccccagaacaggcaaaaaataaggggcaaaaa

SEQ ID NO: 54261 - DNA, 50 bp, synthetic construct
  source 1..50: mol_type = other DNA
tttggttttgaaacctttaccggaaaaccgtaaaaccgatgaaaagcgaa

SEQ ID NO: 54262 - DNA, 50 bp, synthetic construct
  source 1..50: mol_type = other DNA
attcttacccaaaccagaagcttttaatgtcttttttgcacccttagtat

SEQ ID NO: 54263 - DNA, 50 bp, synthetic construct
  source 1..50: mol_type = other DNA
tatacgccaattattatagcatattaacttgctatagttcggatagtatg

SEQ ID NO: 54264 - DNA, 50 bp, synthetic construct
  source 1..50: mol_type = other DNA
tgcgttttaataacataatagacatatgcattaagttttattacttcatg

SEQ ID NO: 54265 - DNA, 50 bp, synthetic construct
  source 1..50: mol_type = other DNA
ggctgcagcttgcagtcggtgcaggctgctgcaaacggcaaagcgcccgc

SEQ ID NO: 54266 - DNA, 50 bp, synthetic construct
  source 1..50: mol_type = other DNA
caaaaatgccccggaattcaagcccgggctgtcgatccgggaaagttttt

SEQ ID NO: 54267 - DNA, 50 bp, synthetic construct
  source 1..50: mol_type = other DNA
caaaagaatacccaagaggatgagcgctatcaagcctgggcgttccggtc

SEQ ID NO: 54268 - DNA, 50 bp, synthetic construct
  source 1..50: mol_type = other DNA
atatgtaaataaaaaggaccgcaatcatcttttcctttttcttttttgat

SEQ ID NO: 54269 - DNA, 50 bp, synthetic construct
  source 1..50: mol_type = other DNA
tttttagatagccctcaaaattaaggtctgctttggcatatttttaagtg

SEQ ID NO: 54270 - DNA, 50 bp, synthetic construct
  source 1..50: mol_type = other DNA
cattattaatataaaattcgtatgaagctattgtttttattgctaacccc

SEQ ID NO: 54271 - DNA, 50 bp, synthetic construct
  source 1..50: mol_type = other DNA
tttcccttcgtcggtaagagagttatgacaatcttatcatcatagacgaa

SEQ ID NO: 54272 - DNA, 50 bp, synthetic construct
  source 1..50: mol_type = other DNA
aaaatccatgctttcaactcccgtttttaggagacgagagtatggattta

SEQ ID NO: 54273 - DNA, 50 bp, synthetic construct
  source 1..50: mol_type = other DNA
gcccttctgcgcccagcaggagggctttttcgtgtatgttggtgaaacga

SEQ ID NO: 54274 - DNA, 50 bp, synthetic construct
  source 1..50: mol_type = other DNA
tcgtcattccggccgcccagctcggaggagcttgatcgcaagcgcgaggc

SEQ ID NO: 54275 - DNA, 50 bp, synthetic construct
  source 1..50: mol_type = other DNA
ccaactccgccgcaaatgttcgctgcagttgcagttgtcggcaaagtgcg

SEQ ID NO: 54276 - DNA, 50 bp, synthetic construct
  source 1..50: mol_type = other DNA
aaatcaaagccgcgcaagaagaaatcttccaatggcatcggctttgcata

SEQ ID NO: 54277 - DNA, 50 bp, synthetic construct
  source 1..50: mol_type = other DNA
tttcttttcgctccttattttcgtgaacgaaaggagcagccgaatgagtg

SEQ ID NO: 54278 - DNA, 50 bp, synthetic construct
  source 1..50: mol_type = other DNA
tttgttgttcgacaaaccggaattgcgtcgccggtatcgtggttacggat

SEQ ID NO: 54279 - DNA, 50 bp, synthetic construct
  source 1..50: mol_type = other DNA
attataaagtaaatcaagatacttgatatcatcaaggctttttttatgcg

SEQ ID NO: 54280 - DNA, 50 bp, synthetic construct
  source 1..50: mol_type = other DNA
atcatcatcatagccaccggggatacttattcggtctgaatgatgatgag

SEQ ID NO: 54281 - DNA, 50 bp, synthetic construct
  source 1..50: mol_type = other DNA
ctgatctgaatttccacaagccatacggattttgtgcaaattcttgtgaa

SEQ ID NO: 54282 - DNA, 50 bp, synthetic construct
  source 1..50: mol_type = other DNA
caaagaaaaagttctccacgattgagccccgtataggggctttttctgtt

SEQ ID NO: 54283 - DNA, 50 bp, synthetic construct
  source 1..50: mol_type = other DNA
gtcacatgatagaatcggaattggatgtgatggatctcattgacgatgac

SEQ ID NO: 54284 - DNA, 50 bp, synthetic construct
  source 1..50: mol_type = other DNA
cttcgctcaccgccctgcgattcagccgcggccaagggcgggagccgcaa

SEQ ID NO: 54285 - DNA, 50 bp, synthetic construct
  source 1..50: mol_type = other DNA
attatcctgtggctctacttagcctttagctcattgagccacttaacaat

SEQ ID NO: 54286 - DNA, 50 bp, synthetic construct
  source 1..50: mol_type = other DNA
actcgctaattcgtacttccatgataacatggataaatcacagataaagc

SEQ ID NO: 54287 - DNA, 50 bp, synthetic construct
  source 1..50: mol_type = other DNA
tacattaatcgctctgaacccaggataatttcatcagttttattaaaaac

SEQ ID NO: 54288 - DNA, 50 bp, synthetic construct
  source 1..50: mol_type = other DNA
ctctctttttatttttgttatttattggagtaacaattaaaatatgatta

SEQ ID NO: 54289 - DNA, 50 bp, synthetic construct
  source 1..50: mol_type = other DNA
tgaattttgctttatatcccttaatataaaatcagataatatcaaattct

SEQ ID NO: 54290 - DNA, 50 bp, synthetic construct
  source 1..50: mol_type = other DNA
aaacatccctataataatcactgatatcatgtaatataataaatgtagaa

SEQ ID NO: 54291 - DNA, 50 bp, synthetic construct
  source 1..50: mol_type = other DNA
tacaagagcatcctgctctcatccattcaccatagaaggaggctattttt

SEQ ID NO: 54292 - DNA, 50 bp, synthetic construct
  source 1..50: mol_type = other DNA
cttgttgaaaattatttgcttgataacataaaaaaggaaaggtgatatga

SEQ ID NO: 54293 - DNA, 50 bp, synthetic construct
  source 1..50: mol_type = other DNA
gacgggttatattctgaatgatctgtagagccacaggataataagcataa

SEQ ID NO: 54294 - DNA, 50 bp, synthetic construct
  source 1..50: mol_type = other DNA
taataaaggtacgtccacgtaataaacaccactttgacaagcaggtgtta

SEQ ID NO: 54295 - DNA, 50 bp, synthetic construct
  source 1..50: mol_type = other DNA
ctatattttcctctgtggctggacaacttaatcacaggaggtaaatatat

SEQ ID NO: 54296 - DNA, 50 bp, synthetic construct
  source 1..50: mol_type = other DNA
aatacaaagaaaatacccctgcattcatattcacctattttcttcgtatc

SEQ ID NO: 54297 - DNA, 50 bp, synthetic construct
  source 1..50: mol_type = other DNA
tgagaaaagtctgatttttacacggatccgtacccggtaggctttttctt

SEQ ID NO: 54298 - DNA, 50 bp, synthetic construct
  source 1..50: mol_type = other DNA
cttgatatttttttactcttataatattgtagcaaaatgctttcattatg

SEQ ID NO: 54299 - DNA, 50 bp, synthetic construct
  source 1..50: mol_type = other DNA
tctgtgcattgcgcacggctgctcttttgcagcgtgtgcgtggggcgtgg

SEQ ID NO: 54300 - DNA, 50 bp, synthetic construct
  source 1..50: mol_type = other DNA
tgccgatcaggctctttttgaagatatcccggaacaggacgatcccgacc

SEQ ID NO: 54301 - DNA, 50 bp, synthetic construct
  source 1..50: mol_type = other DNA
tcctttctctttgggtagtctatataatttactgtgcgtaagaaaaagaa

SEQ ID NO: 54302 - DNA, 50 bp, synthetic construct
  source 1..50: mol_type = other DNA
atgacgatcagttacatttgtaagaacttacttatataaggtaggttctc

SEQ ID NO: 54303 - DNA, 50 bp, synthetic construct
  source 1..50: mol_type = other DNA
accctacggctacagcattgaaaacggcttacatcgaaaagccgcagggc

SEQ ID NO: 54304 - DNA, 50 bp, synthetic construct
  source 1..50: mol_type = other DNA
tggttttgagatatgtaatatcatcaatgtaacaagcccctcagtacctt

SEQ ID NO: 54305 - DNA, 50 bp, synthetic construct
  source 1..50: mol_type = other DNA
cggtaacaagcgcgacagctccgtcaacgatgccatcaagttcctccggg

SEQ ID NO: 54306 - DNA, 50 bp, synthetic construct
  source 1..50: mol_type = other DNA
tcgccgcaacattatgcgtcaaaaaaggaggacttcgtatggcttctcgc

SEQ ID NO: 54307 - DNA, 50 bp, synthetic construct
  source 1..50: mol_type = other DNA
tcccgtcctgcccggtgtatttaatgttcaatcgaaacgacaggacggga

SEQ ID NO: 54308 - DNA, 50 bp, synthetic construct
  source 1..50: mol_type = other DNA
gaagtcatgttccataatatagttttgtgtatattatggcttatgctatg

SEQ ID NO: 54309 - DNA, 50 bp, synthetic construct
  source 1..50: mol_type = other DNA
gataccgtgattcttggctgggagagctcctggagtaccataacgacgta

SEQ ID NO: 54310 - DNA, 50 bp, synthetic construct
  source 1..50: mol_type = other DNA
tgcgctcatctgtccaagcggccttcagcgaacatgggaggattttcgtt

SEQ ID NO: 54311 - DNA, 50 bp, synthetic construct
  source 1..50: mol_type = other DNA
tttgttgttcgacaaaccggaattgcgtcgccggtatggtagttacggat

SEQ ID NO: 54312 - DNA, 50 bp, synthetic construct
  source 1..50: mol_type = other DNA
gccattcttatcatcctttctctgaacagagaaacctctttgaagccggt

SEQ ID NO: 54313 - DNA, 50 bp, synthetic construct
  source 1..50: mol_type = other DNA
acttcgatgtttacactatattcattcctgatccgtggaaacacggcagt

SEQ ID NO: 54314 - DNA, 50 bp, synthetic construct
  source 1..50: mol_type = other DNA
aacgtagctgtttttcagaatcgctctcgattcggaaaatcatcgttgac

SEQ ID NO: 54315 - DNA, 50 bp, synthetic construct
  source 1..50: mol_type = other DNA
ttctgtgtttgaagaatttatgaatcgtcataaatgtcggtcacaaaaaa

SEQ ID NO: 54316 - DNA, 50 bp, synthetic construct
  source 1..50: mol_type = other DNA
gccgcagcccttgacttttgatcgcgcccctccaagtgaggggcgtttcc

SEQ ID NO: 54317 - DNA, 50 bp, synthetic construct
  source 1..50: mol_type = other DNA
aatcagcaatgatacggacgctggccatggcggcggacttcctgctcatc

SEQ ID NO: 54318 - DNA, 50 bp, synthetic construct
  source 1..50: mol_type = other DNA
atttttcagtttttcacccatgttacttcctgggcgctgttcacacgaat

SEQ ID NO: 54319 - DNA, 50 bp, synthetic construct
  source 1..50: mol_type = other DNA
ctgcgctcatactcgatatttctctctctggaggagcagcgggaggcagc

SEQ ID NO: 54320 - DNA, 50 bp, synthetic construct
  source 1..50: mol_type = other DNA
ccgtagaataacaggtttttctggctcaagaaatagcgttttattccttg

SEQ ID NO: 54321 - DNA, 50 bp, synthetic construct
  source 1..50: mol_type = other DNA
gcaacccccattgaagggctccgacatcataggcccccataggctcttgc

SEQ ID NO: 54322 - DNA, 50 bp, synthetic construct
  source 1..50: mol_type = other DNA
tctttaatatatgcgattacttttgcaaaccgtatggcatatattacgaa

SEQ ID NO: 54323 - DNA, 50 bp, synthetic construct
  source 1..50: mol_type = other DNA
ttataccgccatttgctgcctctgtcataaggcttgacggggcgatagac

SEQ ID NO: 54324 - DNA, 50 bp, synthetic construct
  source 1..50: mol_type = other DNA
cgaagacgaaaaattcccggctgcgggcagcattgtcgaagcgcgaatcg

SEQ ID NO: 54325 - DNA, 50 bp, synthetic construct
  source 1..50: mol_type = other DNA
catccatcggcctcacctctgcgcgccaacagtggtgatcacggcagaat

SEQ ID NO: 54326 - DNA, 50 bp, synthetic construct
  source 1..50: mol_type = other DNA
aaatgccttccttttcaaagtagcattttctgctgaaaagcctttctttt

SEQ ID NO: 54327 - DNA, 50 bp, synthetic construct
  source 1..50: mol_type = other DNA
tgtttcaattcctttttggctttggcacaatgccagcagtaacagcagcg

SEQ ID NO: 54328 - DNA, 50 bp, synthetic construct
  source 1..50: mol_type = other DNA
ggtgatgttttcggaaatgctccggccggagcagttacgctccgaccttg

SEQ ID NO: 54329 - DNA, 50 bp, synthetic construct
  source 1..50: mol_type = other DNA
tttttgccctggatatgtgttcccaataaaaatcatagtcagagataaaa

SEQ ID NO: 54330 - DNA, 50 bp, synthetic construct
  source 1..50: mol_type = other DNA
agcggcaaggaaagcagtgatgccggcgcaccacagcgtttcgcgccagg

SEQ ID NO: 54331 - DNA, 50 bp, synthetic construct
  source 1..50: mol_type = other DNA
ggcgtcggcggggtttctttttttccaaaaatacaaacaacccgcttgcc

SEQ ID NO: 54332 - DNA, 50 bp, synthetic construct
  source 1..50: mol_type = other DNA
ggctgtacatcttcgccgcgggttccgcaccgtagcggggatcatgcgca

SEQ ID NO: 54333 - DNA, 50 bp, synthetic construct
  source 1..50: mol_type = other DNA
aaagaaaagttaaaccaagtggaaaattccatttatatttcctttgtttt

SEQ ID NO: 54334 - DNA, 50 bp, synthetic construct
  source 1..50: mol_type = other DNA
acagcatatgacaatataaagctgggcagctttcttttctctttcttcct

SEQ ID NO: 54335 - DNA, 50 bp, synthetic construct
  source 1..50: mol_type = other DNA
gcagaaaccaaattgtccgtcaaagccgaaaaaatcaatcggctttcttt

SEQ ID NO: 54336 - DNA, 50 bp, synthetic construct
  source 1..50: mol_type = other DNA
tagtgttctccttctatgaacagggatctctcgattgattttgaacgtcg

SEQ ID NO: 54337 - DNA, 50 bp, synthetic construct
  source 1..50: mol_type = other DNA
acctgatgtggcgattaatacgttagcagattttgactgcggaatcagga

SEQ ID NO: 54338 - DNA, 50 bp, synthetic construct
  source 1..50: mol_type = other DNA
cgctcccgcgggcgaagccgtggcggcccacttgtatatccactcaaggg

SEQ ID NO: 54339 - DNA, 50 bp, synthetic construct
  source 1..50: mol_type = other DNA
caaccacagataatggaatgaaatcattttcaatccggtatccatacgga

SEQ ID NO: 54340 - DNA, 50 bp, synthetic construct
  source 1..50: mol_type = other DNA
cctgttcaaagggatcgtcagaaacctttataattatctatttgttgtaa

SEQ ID NO: 54341 - DNA, 50 bp, synthetic construct
  source 1..50: mol_type = other DNA
gccattatgactgtggatagcataccgactttgtctacattattatcggg

SEQ ID NO: 54342 - DNA, 50 bp, synthetic construct
  source 1..50: mol_type = other DNA
ggtctttctttgcggtcttggggaattaaagcacagtcagacggaacccc

SEQ ID NO: 54343 - DNA, 50 bp, synthetic construct
  source 1..50: mol_type = other DNA
gctgtttcccgcctcggtgcagcccggagagtcataatccgggaacgtta

SEQ ID NO: 54344 - DNA, 50 bp, synthetic construct
  source 1..50: mol_type = other DNA
ctccacttccttgtgctttttccgttgcttgactaatcgcctaagtagag

SEQ ID NO: 54345 - DNA, 50 bp, synthetic construct
  source 1..50: mol_type = other DNA
gaatgttcatcctttttatagtatgcggactttcaaaaggaggactaatt

SEQ ID NO: 54346 - DNA, 50 bp, synthetic construct
  source 1..50: mol_type = other DNA
atcctgaaaaagtccggcaaggctgacaccatgccgggctataagtccga

SEQ ID NO: 54347 - DNA, 50 bp, synthetic construct
  source 1..50: mol_type = other DNA
ctgtttatactaaaaacgcaaaaaatttttacatattttaaaccgaggtg

SEQ ID NO: 54348 - DNA, 50 bp, synthetic construct
  source 1..50: mol_type = other DNA
cgtggattttttatagagtgtcttgtaaaaataggtataaaaaatagacc

SEQ ID NO: 54349 - DNA, 50 bp, synthetic construct
  source 1..50: mol_type = other DNA
ggcgtagataaaataagacattgtatgcactggcttatttcgaaaaatac

SEQ ID NO: 54350 - DNA, 50 bp, synthetic construct
  source 1..50: mol_type = other DNA
aaagcacatcctgctggcggttatcataggccgcaaacaggctgtgctgt

SEQ ID NO: 54351 - DNA, 50 bp, synthetic construct
  source 1..50: mol_type = other DNA
caaggtgccatctacaccattattatcccctttcgatagatggaaccagt

SEQ ID NO: 54352 - DNA, 50 bp, synthetic construct
  source 1..50: mol_type = other DNA
gattttatggtaaataggtatattaatatgacagactttagcaactacaa

SEQ ID NO: 54353 - DNA, 50 bp, synthetic construct
  source 1..50: mol_type = other DNA
agtaacatgttagctaataaacctacagatttactagcaaaataacaact

SEQ ID NO: 54354 - DNA, 50 bp, synthetic construct
  source 1..50: mol_type = other DNA
ggacccgtcttttcctgtgtacatcatcaatggattcaaacggagggtag

SEQ ID NO: 54355 - DNA, 50 bp, synthetic construct
  source 1..50: mol_type = other DNA
gtgtatcaataggaaggtctcttcaggattacacctttcttatgatacac

SEQ ID NO: 54356 - DNA, 50 bp, synthetic construct
  source 1..50: mol_type = other DNA
tgatacttgattagtttaacaaatatatgagcgaaactactcagataggt

SEQ ID NO: 54357 - DNA, 50 bp, synthetic construct
  source 1..50: mol_type = other DNA
cgatctgccgcagcctcatctggggtcgctcgactggttcatggagatcg

SEQ ID NO: 54358 - DNA, 50 bp, synthetic construct
  source 1..50: mol_type = other DNA
cctgtgagcgagttccgccccgcccagtggggttaaccagtgaggggagg

SEQ ID NO: 54359 - DNA, 50 bp, synthetic construct
  source 1..50: mol_type = other DNA
atgcgtgaaagtgaatgaaaactcatgaagccacacaacgtttcatgcgt

SEQ ID NO: 54360 - DNA, 50 bp, synthetic construct
  source 1..50: mol_type = other DNA
atcatttaaagatgaacttataaacgattatgacttcaatgacccttgat

SEQ ID NO: 54361 - DNA, 50 bp, synthetic construct
  source 1..50: mol_type = other DNA
acatattgtacatagcatcttcctccaggaaaatgatacgtagtccatga

SEQ ID NO: 54362 - DNA, 50 bp, synthetic construct
  source 1..50: mol_type = other DNA
aaattttccatgaaggattctctcaggagagaagcctatggcgaagaagg

SEQ ID NO: 54363 - DNA, 50 bp, synthetic construct
  source 1..50: mol_type = other DNA
gggacagtgatatgttccatgggtgtagtaaagaaacatatatctgtgat

SEQ ID NO: 54364 - DNA, 50 bp, synthetic construct
  source 1..50: mol_type = other DNA
cgtttcttctcctcccatcgtttcttgaaaatatgctggtcgaacgcctg

SEQ ID NO: 54365 - DNA, 50 bp, synthetic construct
  source 1..50: mol_type = other DNA
atgaatgtgtacttaatcgaaagtaacattttgatttaatacttttagcg

SEQ ID NO: 54366 - DNA, 50 bp, synthetic construct
  source 1..50: mol_type = other DNA
ctatccctgccaccaaacccttacaccatcactataggtggcgaggatta

SEQ ID NO: 54367 - DNA, 50 bp, synthetic construct
  source 1..50: mol_type = other DNA
cttctacgtggagcgcaccagcgcctgtgacggtgcgggccatttagcgt

SEQ ID NO: 54368 - DNA, 50 bp, synthetic construct
  source 1..50: mol_type = other DNA
tttacggttttcgggatccggcgcacgagccggcggcttgctctcttaat

SEQ ID NO: 54369 - DNA, 50 bp, synthetic construct
  source 1..50: mol_type = other DNA
catcattctgttttctatcatattgaaatcgaatgggtgcaggaatgttc

SEQ ID NO: 54370 - DNA, 50 bp, synthetic construct
  source 1..50: mol_type = other DNA
aggattatgtcagaggggagttcactcgcccaagggaaggaggaaatcct

SEQ ID NO: 54371 - DNA, 50 bp, synthetic construct
  source 1..50: mol_type = other DNA
ttccgttcttcatccggcgcagtagatgctctgccggaagaagatgtgaa

SEQ ID NO: 54372 - DNA, 50 bp, synthetic construct
  source 1..50: mol_type = other DNA
tgtttacacactaactttgctgcaatgggaggtgagttatcatgaaaaag

SEQ ID NO: 54373 - DNA, 50 bp, synthetic construct
  source 1..50: mol_type = other DNA
gttgtattttctaaagagtcacatataactgaaaattttgataatccaat

SEQ ID NO: 54374 - DNA, 50 bp, synthetic construct
  source 1..50: mol_type = other DNA
tatattcatctaacatttgttagaaatctaacatttgttgcataaaagaa

SEQ ID NO: 54375 - DNA, 50 bp, synthetic construct
  source 1..50: mol_type = other DNA
aaccgcctgtaaaaatcgccgctgtacctgtatctgtatctgagactgta

SEQ ID NO: 54376 - DNA, 50 bp, synthetic construct
  source 1..50: mol_type = other DNA
tcaggaagaccagatccacagctttgaagctgcttacggatgattccgtg

SEQ ID NO: 54377 - DNA, 50 bp, synthetic construct
  source 1..50: mol_type = other DNA
ccgtccgcattcccaggttcaggaatgtctgatgaagagattgcggaggt

SEQ ID NO: 54378 - DNA, 50 bp, synthetic construct
  source 1..50: mol_type = other DNA
atatttttagcaatatacaagcccattgtggtgatattatgaaaagaaaa

SEQ ID NO: 54379 - DNA, 50 bp, synthetic construct
  source 1..50: mol_type = other DNA
ccctgatatatagatttttaaggtttatctttaaaaatccaatataattc

SEQ ID NO: 54380 - DNA, 50 bp, synthetic construct
  source 1..50: mol_type = other DNA
gtggctgcggctgtgacaacggctgcagactggttcatagcctccgccaa

SEQ ID NO: 54381 - DNA, 50 bp, synthetic construct
  source 1..50: mol_type = other DNA
tgtgactgccagatcataggatccagtttatcatcttccaggcagtcacg

SEQ ID NO: 54382 - DNA, 50 bp, synthetic construct
  source 1..50: mol_type = other DNA
gaaaagaagataagggtggcagcctacaatgccaaatgtagcttaccaaa

SEQ ID NO: 54383 - DNA, 50 bp, synthetic construct
  source 1..50: mol_type = other DNA
tgtgcaaaaaaaaacagacagatattgttgtttcaattttttaatggcta

SEQ ID NO: 54384 - DNA, 50 bp, synthetic construct
  source 1..50: mol_type = other DNA
ccgcccgctcgtcaccctcgtccgcatcgttcccgtgttcagcacgtttc

SEQ ID NO: 54385 - DNA, 50 bp, synthetic construct
  source 1..50: mol_type = other DNA
atacggcaacacgctgttcattttccaaagagaaaggagtggcagaattt

SEQ ID NO: 54386 - DNA, 50 bp, synthetic construct
  source 1..50: mol_type = other DNA
ttttttgatttctccccaccctttcagaccaactcggagctttccaacaa

SEQ ID NO: 54387 - DNA, 50 bp, synthetic construct
  source 1..50: mol_type = other DNA
tctttgatacctttcacctttctttcacaaaatatgatgtgtatgcaagg

SEQ ID NO: 54388 - DNA, 50 bp, synthetic construct
  source 1..50: mol_type = other DNA
gccgaccatcaatccgctgacacaccttcatctcagccaggatgaggtgt

SEQ ID NO: 54389 - DNA, 50 bp, synthetic construct
  source 1..50: mol_type = other DNA
aagcggctgggcgtccgcctttttgcagaaagctggacgcctgaaatgaa

SEQ ID NO: 54390 - DNA, 50 bp, synthetic construct
  source 1..50: mol_type = other DNA
caccgtgcatttctttgtatgtagcctgaaatgaaggaaaaagcacgaca

SEQ ID NO: 54391 - DNA, 50 bp, synthetic construct
  source 1..50: mol_type = other DNA
gaaagccttatatatcaacggatttccatccgcatccttcgtatatccga

SEQ ID NO: 54392 - DNA, 50 bp, synthetic construct
  source 1..50: mol_type = other DNA
aatatccccggcagctgccaggttaaaactatggagctggtcttcctgat

SEQ ID NO: 54393 - DNA, 50 bp, synthetic construct
  source 1..50: mol_type = other DNA
tatggagttgtgggggaaagtccaaatgatacagtgaacgcagtaatata

SEQ ID NO: 54394 - DNA, 50 bp, synthetic construct
  source 1..50: mol_type = other DNA
caatcgtataccaactgacgaaagatcttacgaatcgaatgatacggctg

SEQ ID NO: 54395 - DNA, 50 bp, synthetic construct
  source 1..50: mol_type = other DNA
taaataagccgtataattatatttaattgtatcaaacagagtgatatata

SEQ ID NO: 54396 - DNA, 50 bp, synthetic construct
  source 1..50: mol_type = other DNA
ttcaatgaaggccttgaccacttccggaagtgttcaaaacccaaataaaa

SEQ ID NO: 54397 - DNA, 50 bp, synthetic construct
  source 1..50: mol_type = other DNA
caataaaaatatattaaaaagttgagcattttacacatatctttttatta

SEQ ID NO: 54398 - DNA, 50 bp, synthetic construct
  source 1..50: mol_type = other DNA
ctgcctgccgatatgggttgcttaaccatgcgtttgctctgtcgtggcaa

SEQ ID NO: 54399 - DNA, 50 bp, synthetic construct
  source 1..50: mol_type = other DNA
gggaggaatggcgaaaagaggtattctgctcatttttcaccaatcctttc

SEQ ID NO: 54400 - DNA, 50 bp, synthetic construct
  source 1..50: mol_type = other DNA
atattatttaagcgctcgtaaataattatataagcaagagtagctaatac

SEQ ID NO: 54401 - DNA, 50 bp, synthetic construct
  source 1..50: mol_type = other DNA
ttctgtaattgttttgccatcaaattttttaatggaaaataatttaagaa

SEQ ID NO: 54402 - DNA, 50 bp, synthetic construct
  source 1..50: mol_type = other DNA
gatttaattgggtaaagtacgcattaatgaatcaattaaaattttaaatt

SEQ ID NO: 54403 - DNA, 50 bp, synthetic construct
  source 1..50: mol_type = other DNA
attctgatctttattaaacctaatttactaaatttaactaagaaaggata

SEQ ID NO: 54404 - DNA, 50 bp, synthetic construct
  source 1..50: mol_type = other DNA
caacgacttcacggcattatctctgcagcatccttcaaagaaagtcctgc

SEQ ID NO: 54405 - DNA, 50 bp, synthetic construct
  source 1..50: mol_type = other DNA
ctcgagcgggatcgcggagccggcgaacctgagaagcggtcagcctagag

SEQ ID NO: 54406 - DNA, 50 bp, synthetic construct
  source 1..50: mol_type = other DNA
ttaatctttattaaatgaatcttctaaagaaaaattttaactaagatatt

SEQ ID NO: 54407 - DNA, 50 bp, synthetic construct
  source 1..50: mol_type = other DNA
gtttcacctgaattattttatgctgttatttgtaatttttatagtggggt

SEQ ID NO: 54408 - DNA, 50 bp, synthetic construct
  source 1..50: mol_type = other DNA
ttgcggcgtattggtcgctcgactcgatatgcccgaacaatactgcttat

SEQ ID NO: 54409 - DNA, 50 bp, synthetic construct
  source 1..50: mol_type = other DNA
aaatcagattctgacataatttctatagatattattctagtatgggaaat

SEQ ID NO: 54410 - DNA, 50 bp, synthetic construct
  source 1..50: mol_type = other DNA
gtaggtggcgctggaatgtcgcagccggtgtgtatcccagcaccacctac

SEQ ID NO: 54411 - DNA, 50 bp, synthetic construct
  source 1..50: mol_type = other DNA
caaccgattcaacgactttcccacatcagcttctctcgctggatgatgta

SEQ ID NO: 54412 - DNA, 50 bp, synthetic construct
  source 1..50: mol_type = other DNA
tgaagaagcgtaccaaatttacgatcacataaatcatgcgaatttcctcc

SEQ ID NO: 54413 - DNA, 50 bp, synthetic construct
  source 1..50: mol_type = other DNA
ctggaacatgctgtgctggatgcgataatagccccctagacaaggtctat

SEQ ID NO: 54414 - DNA, 50 bp, synthetic construct
  source 1..50: mol_type = other DNA
cgagaaatcgacttggtaatcaccaaaaaacagccctgccggatttctcc

SEQ ID NO: 54415 - DNA, 50 bp, synthetic construct
  source 1..50: mol_type = other DNA
ggttagttatattttaatgtaggcgttgtgacatgaaaataagactaact

SEQ ID NO: 54416 - DNA, 50 bp, synthetic construct
  source 1..50: mol_type = other DNA
gacttatgaagaccgaaatgaccagaatcactccggggtcaccataagaa

SEQ ID NO: 54417 - DNA, 50 bp, synthetic construct
  source 1..50: mol_type = other DNA
ttttcaggtaagcaaaaagcagggaaacaagcgttttatatactcgaaac

SEQ ID NO: 54418 - DNA, 50 bp, synthetic construct
  source 1..50: mol_type = other DNA
tgctgtccgggatgggcctttccacggctggatcgtgatctcgcccagcg

SEQ ID NO: 54419 - DNA, 50 bp, synthetic construct
  source 1..50: mol_type = other DNA
gtcctccgtaaaaataatgtccgaaatcgctcaaaatttccgtggaggtc

SEQ ID NO: 54420 - DNA, 50 bp, synthetic construct
  source 1..50: mol_type = other DNA
cggcttttcatctgtcataccaaatccgttgcaggacagatgaattgtct

SEQ ID NO: 54421 - DNA, 50 bp, synthetic construct
  source 1..50: mol_type = other DNA
cactactacaatattttcagaatagcctgctacaatattttgtggtatga

SEQ ID NO: 54422 - DNA, 50 bp, synthetic construct
  source 1..50: mol_type = other DNA
ttgttttctcagcgggaagtttcgatcttgccggggcgcagagaaaacag

SEQ ID NO: 54423 - DNA, 50 bp, synthetic construct
  source 1..50: mol_type = other DNA
cgcttctttttaacataatcattggtacattattatcggaaaatgcttga

SEQ ID NO: 54424 - DNA, 50 bp, synthetic construct
  source 1..50: mol_type = other DNA
atagctaatattggtttcatactttaaggagcgaaaagaaatggccaaat

SEQ ID NO: 54425 - DNA, 50 bp, synthetic construct
  source 1..50: mol_type = other DNA
tcacatgatcatccaacgcgaagaagccttcgcctttggcttggtcacga

SEQ ID NO: 54426 - DNA, 50 bp, synthetic construct
  source 1..50: mol_type = other DNA
cattcggatcttccaatcttcttcacatggaagtaaccaagatacctaag

SEQ ID NO: 54427 - DNA, 50 bp, synthetic construct
  source 1..50: mol_type = other DNA
ccaacgcaatacagagagtggttaattatgccctgaatgacttgctattc

SEQ ID NO: 54428 - DNA, 50 bp, synthetic construct
  source 1..50: mol_type = other DNA
tggatgcgtagcagcacagaagcaatcgccggtgcgctcgttgatatcgc

SEQ ID NO: 54429 - DNA, 50 bp, synthetic construct
  source 1..50: mol_type = other DNA
ctactacacaagcaatacccctctgtgctggggtatctcttgtgtagtag

SEQ ID NO: 54430 - DNA, 50 bp, synthetic construct
  source 1..50: mol_type = other DNA
ctgcaacaaagaaccgatttacagcccctgcacggtggtcttcgtgcgat

SEQ ID NO: 54431 - DNA, 50 bp, synthetic construct
  source 1..50: mol_type = other DNA
aacctcgtcgggcttcccgccgatgaagcgtcggagaagatgaagaggag

SEQ ID NO: 54432 - DNA, 50 bp, synthetic construct
  source 1..50: mol_type = other DNA
acaattatctatcatcctgtatatccagatccaggataatggaaatgtga

SEQ ID NO: 54433 - DNA, 50 bp, synthetic construct
  source 1..50: mol_type = other DNA
actaaaaaatgtaataatcctactgtcaaacagatattacatatatttca

SEQ ID NO: 54434 - DNA, 50 bp, synthetic construct
  source 1..50: mol_type = other DNA
aaagatttcaaatatattatccgctaagaaataattttattaaaatctga

SEQ ID NO: 54435 - DNA, 50 bp, synthetic construct
  source 1..50: mol_type = other DNA
taacagctgagggtgtttcgcctgaaagcctccaactgcaacagcttttc

SEQ ID NO: 54436 - DNA, 50 bp, synthetic construct
  source 1..50: mol_type = other DNA
ccggatacgcccgtgtttctaccgacggagcaacgactctgccgttccga

SEQ ID NO: 54437 - DNA, 50 bp, synthetic construct
  source 1..50: mol_type = other DNA
accaaggtcggagcgtaactgctccggagcagccggagaatcccggcgtc

SEQ ID NO: 54438 - DNA, 50 bp, synthetic construct
  source 1..50: mol_type = other DNA
cagcggagcaggctttgtagccaagtaggtatgcaaagcagctcctcttt

SEQ ID NO: 54439 - DNA, 50 bp, synthetic construct
  source 1..50: mol_type = other DNA
acgcaccagacgaagagaccgacgatcagcggtttcttcatctatggcgt

SEQ ID NO: 54440 - DNA, 50 bp, synthetic construct
  source 1..50: mol_type = other DNA
gcatcgctgcggtatctgagtcagcgtaatgttagaaggaacagccggtg

SEQ ID NO: 54441 - DNA, 50 bp, synthetic construct
  source 1..50: mol_type = other DNA
ctcggatgtggtagatgaaatgtttcaactttatttatacaacatcagat

SEQ ID NO: 54442 - DNA, 50 bp, synthetic construct
  source 1..50: mol_type = other DNA
tcatatctgttacatttaatattatttaatatcaaatgtattcattgtgg

SEQ ID NO: 54443 - DNA, 50 bp, synthetic construct
  source 1..50: mol_type = other DNA
taatgaatacacgtaaatcagtcccttagttttattttgtggattttggt

SEQ ID NO: 54444 - DNA, 50 bp, synthetic construct
  source 1..50: mol_type = other DNA
ttagttttgtaatttttctcataatatagtggttacagttagaaaacaaa

SEQ ID NO: 54445 - DNA, 50 bp, synthetic construct
  source 1..50: mol_type = other DNA
gttccagcccatccactttaatcatagatgtaacaggggatgcctggaac

SEQ ID NO: 54446 - DNA, 50 bp, synthetic construct
  source 1..50: mol_type = other DNA
cctgttctcccgtccgttgttgtatgtatagcagcggaaggaagtgattt

SEQ ID NO: 54447 - DNA, 50 bp, synthetic construct
  source 1..50: mol_type = other DNA
ttcggcttcggccgggtgtcttttttaaagagcgcaagcccgaagccgca

SEQ ID NO: 54448 - DNA, 50 bp, synthetic construct
  source 1..50: mol_type = other DNA
aagggtgtttcgatggataatgtaggtacattattagccggaaaaccctt

SEQ ID NO: 54449 - DNA, 50 bp, synthetic construct
  source 1..50: mol_type = other DNA
tgggaatgccgcaggatttttcatacccgaaagcggcggcaaagttcagg

SEQ ID NO: 54450 - DNA, 50 bp, synthetic construct
  source 1..50: mol_type = other DNA
cagaatacactagcttgcgaaattatatctttcaaaacaatatttgtcga

SEQ ID NO: 54451 - DNA, 50 bp, synthetic construct
  source 1..50: mol_type = other DNA
aaatgataaaatcgatccaaaaatttgttggttctatgacttttacattt

SEQ ID NO: 54452 - DNA, 50 bp, synthetic construct
  source 1..50: mol_type = other DNA
ccttcatgggattgctgatttttacataaaaaggagggcgaaatggaagt

SEQ ID NO: 54453 - DNA, 50 bp, synthetic construct
  source 1..50: mol_type = other DNA
aggaatttccataccaatagtggaattttggaagtggtaaataatgatct

SEQ ID NO: 54454 - DNA, 50 bp, synthetic construct
  source 1..50: mol_type = other DNA
aaaactgaactgcataaatctgccgtggcagaatttggagattcagataa

SEQ ID NO: 54455 - DNA, 50 bp, synthetic construct
  source 1..50: mol_type = other DNA
tttggcactggggtgaaatgcaggatgccccatttgcagttttccgaaat

SEQ ID NO: 54456 - DNA, 50 bp, synthetic construct
  source 1..50: mol_type = other DNA
ggtggtaagccaagggaatacccatatggttaagcctccttcttagtata

SEQ ID NO: 54457 - DNA, 50 bp, synthetic construct
  source 1..50: mol_type = other DNA
atcgcatattattcagcagataacatgctgtctccctccctatatcgtct

SEQ ID NO: 54458 - DNA, 50 bp, synthetic construct
  source 1..50: mol_type = other DNA
agttttttgaaacagctattcaccaattccttgcgctccttcaggcggta

SEQ ID NO: 54459 - DNA, 50 bp, synthetic construct
  source 1..50: mol_type = other DNA
catgaagcaggtagtcatcaagcggcttttgaacggacagtgtggtattg

SEQ ID NO: 54460 - DNA, 50 bp, synthetic construct
  source 1..50: mol_type = other DNA
ccggaagatggacttgaatgagaaaggggacatggaagaaaacaatccgc

SEQ ID NO: 54461 - DNA, 50 bp, synthetic construct
  source 1..50: mol_type = other DNA
cacgtaatccccgtagtggaccacatggtatctactacacggactccgac

SEQ ID NO: 54462 - DNA, 50 bp, synthetic construct
  source 1..50: mol_type = other DNA
tccgcattgcagagggtttcccctctgcaggcaacaatattggatattca

SEQ ID NO: 54463 - DNA, 50 bp, synthetic construct
  source 1..50: mol_type = other DNA
tgcctgcataaatggatcttcatatttattaatatccatttaggtttaac

SEQ ID NO: 54464 - DNA, 50 bp, synthetic construct
  source 1..50: mol_type = other DNA
tttgctttattatatggtgcgggacccatcccatcacatcctttccctga

SEQ ID NO: 54465 - DNA, 50 bp, synthetic construct
  source 1..50: mol_type = other DNA
ccgtccagcaaaccgcgggcgtagatctgcgccgcttcgttcatggacaa

SEQ ID NO: 54466 - DNA, 50 bp, synthetic construct
  source 1..50: mol_type = other DNA
tggatcaatttatgatcgtttatattcacaaaataacatgaataatgtca

SEQ ID NO: 54467 - DNA, 50 bp, synthetic construct
  source 1..50: mol_type = other DNA
aaattatccatgtcaagttcaataggtcttgaactttttattaattatta

SEQ ID NO: 54468 - DNA, 50 bp, synthetic construct
  source 1..50: mol_type = other DNA
ccttgttcaaaaattacttttttgaaagaaacaataatttttcaatgtag

SEQ ID NO: 54469 - DNA, 50 bp, synthetic construct
  source 1..50: mol_type = other DNA
ataaaaatacggtatgcatgttatttataaaatacagttgacattatata

SEQ ID NO: 54470 - DNA, 50 bp, synthetic construct
  source 1..50: mol_type = other DNA
tctatttgagaaagtctcgtgcagatctgcatacgagcatccccacgata

SEQ ID NO: 54471 - DNA, 50 bp, synthetic construct
  source 1..50: mol_type = other DNA
aactcctcttatttaaatatttttatgatgtaatttatttactcttaata

SEQ ID NO: 54472 - DNA, 50 bp, synthetic construct
  source 1..50: mol_type = other DNA
taaaatatattgagatgacttaggaagataatacaaatggtcgtatttca

SEQ ID NO: 54473 - DNA, 50 bp, synthetic construct
  source 1..50: mol_type = other DNA
atttgcagaaggaaatgctgattttacaggtgtattttttatacacaaat

SEQ ID NO: 54474 - DNA, 50 bp, synthetic construct
  source 1..50: mol_type = other DNA
cgtggagaacatcgttcaggcaatctattgcttcacatatattcttttta

SEQ ID NO: 54475 - DNA, 50 bp, synthetic construct
  source 1..50: mol_type = other DNA
atatgcgttatgagtcaaaataaacatttctgttttctcactctgccgcc

SEQ ID NO: 54476 - DNA, 50 bp, synthetic construct
  source 1..50: mol_type = other DNA
atcgaaaatatataatttaccctaattagggtaaaatattaaacgaattt

SEQ ID NO: 54477 - DNA, 50 bp, synthetic construct
  source 1..50: mol_type = other DNA
tttcttcagtgcatcggccttggaaaaatgatgatgatatgccccagagc

SEQ ID NO: 54478 - DNA, 50 bp, synthetic construct
  source 1..50: mol_type = other DNA
agagtacttcagttcgcttccattgatcggttgatacacggcagtaggct

SEQ ID NO: 54479 - DNA, 50 bp, synthetic construct
  source 1..50: mol_type = other DNA
aggcagctttttgtttagttgtttggcagctctaaacaaatatgctgctc

SEQ ID NO: 54480 - DNA, 50 bp, synthetic construct
  source 1..50: mol_type = other DNA
ataaatatttatttttatgaataatacaccaaaaacaggtaaattcaggg

SEQ ID NO: 54481 - DNA, 50 bp, synthetic construct
  source 1..50: mol_type = other DNA
cagcgtatctctacgctggcgatctttccagtcagaccagaaataccgct

SEQ ID NO: 54482 - DNA, 50 bp, synthetic construct
  source 1..50: mol_type = other DNA
ttttcataactttattttttcatagctatgaaaatattatggcattatct

SEQ ID NO: 54483 - DNA, 50 bp, synthetic construct
  source 1..50: mol_type = other DNA
tacaaggatctcgtaactactacttacattttaggaaaggtgatataata

SEQ ID NO: 54484 - DNA, 50 bp, synthetic construct
  source 1..50: mol_type = other DNA
atgaaatcctaactttttgtttgtttggaatgtaagcaacgggctttcct

SEQ ID NO: 54485 - DNA, 50 bp, synthetic construct
  source 1..50: mol_type = other DNA
gtacatcataagtacttccttttttaagtccacaagggcttattttttac

SEQ ID NO: 54486 - DNA, 50 bp, synthetic construct
  source 1..50: mol_type = other DNA
tgtaacctatgcgctctttcttattcattagaattcctgaccgtaggagg

SEQ ID NO: 54487 - DNA, 50 bp, synthetic construct
  source 1..50: mol_type = other DNA
cgcgactgctcgaacagcggtgtcggtgctatcctgttcgcgctctcgta

SEQ ID NO: 54488 - DNA, 50 bp, synthetic construct
  source 1..50: mol_type = other DNA
attttaaacaatatgtggtacatatttatgtcggtgtcaatttttataaa

SEQ ID NO: 54489 - DNA, 50 bp, synthetic construct
  source 1..50: mol_type = other DNA
gagaatggcatcgcagttatcgatgaacgtatctgtctttccagattcct

SEQ ID NO: 54490 - DNA, 50 bp, synthetic construct
  source 1..50: mol_type = other DNA
cccccggtaccagtgcggattagaaggaaaatctgacgaaaggagaggac

SEQ ID NO: 54491 - DNA, 50 bp, synthetic construct
  source 1..50: mol_type = other DNA
acgccgatataccgtcctaatgtatttacatgattatgatacggaggtat

SEQ ID NO: 54492 - DNA, 50 bp, synthetic construct
  source 1..50: mol_type = other DNA
ataagagcaagaaaaaaatatatttgtttgtacaattttcttttgtttga

SEQ ID NO: 54493 - DNA, 50 bp, synthetic construct
  source 1..50: mol_type = other DNA
tctctgaaattccaaagacagcataggtaaggcttgtggaaattcagatc

SEQ ID NO: 54494 - DNA, 50 bp, synthetic construct
  source 1..50: mol_type = other DNA
catcatcaggccacgaggataccaaatggtatccccggagaaaacgacag

SEQ ID NO: 54495 - DNA, 50 bp, synthetic construct
  source 1..50: mol_type = other DNA
gccaaatccgtaaccacgataccggcggataccgtcctgcaggccggtgg

SEQ ID NO: 54496 - DNA, 50 bp, synthetic construct
  source 1..50: mol_type = other DNA
tggtagtcggctttcatgcttctaagagaatccatgaaggccgcatggac

SEQ ID NO: 54497 - DNA, 50 bp, synthetic construct
  source 1..50: mol_type = other DNA
gggcagcattataatccagagattttcttacagcatttgaaaggctgtta

SEQ ID NO: 54498 - DNA, 50 bp, synthetic construct
  source 1..50: mol_type = other DNA
attttataatacaagcagtcaagatttcttattcctgcgttttatacaaa

SEQ ID NO: 54499 - DNA, 50 bp, synthetic construct
  source 1..50: mol_type = other DNA
ggggatattctgaacgaaaaatcgccccgttttgggttgagattatgccc

SEQ ID NO: 54500 - DNA, 50 bp, synthetic construct
  source 1..50: mol_type = other DNA
attccggtgatggggagctttttttcaaaaaagaacgatagccttttcct

SEQ ID NO: 54501 - DNA, 50 bp, synthetic construct
  source 1..50: mol_type = other DNA
aatttaaaataaaatgtgaaaaaatttttatactcatttttacgtatatt

SEQ ID NO: 54502 - DNA, 50 bp, synthetic construct
  source 1..50: mol_type = other DNA
tgaagttatcctgcacgaggtgaatagaaacacagagcagttccgcttca

SEQ ID NO: 54503 - DNA, 50 bp, synthetic construct
  source 1..50: mol_type = other DNA
cggcaaatcctcatcacttttgttataacacaagaaaggaagatttacga

SEQ ID NO: 54504 - DNA, 50 bp, synthetic construct
  source 1..50: mol_type = other DNA
tatgcctttatagctcggggtgtatatgcactcgaaaatttagaggaata

SEQ ID NO: 54505 - DNA, 50 bp, synthetic construct
  source 1..50: mol_type = other DNA
gacccaaagaaaattttgcagattgcatagttgtaaattttttatacaaa

SEQ ID NO: 54506 - DNA, 50 bp, synthetic construct
  source 1..50: mol_type = other DNA
gatcgagtggatgtggctgcaagacgcatcacagaaaatcgacggagatt

SEQ ID NO: 54507 - DNA, 50 bp, synthetic construct
  source 1..50: mol_type = other DNA
agtaaaataataaatattgtcttgtacaagacactataagaaatcaacag

SEQ ID NO: 54508 - DNA, 50 bp, synthetic construct
  source 1..50: mol_type = other DNA
tgacttccttcatccgctgacgcagcaattgctccggccggctgccctcc

SEQ ID NO: 54509 - DNA, 50 bp, synthetic construct
  source 1..50: mol_type = other DNA
agcctggtagggtctgtccattccggtatggatattccttgttgcaggaa

SEQ ID NO: 54510 - DNA, 50 bp, synthetic construct
  source 1..50: mol_type = other DNA
aagcccggacgcatggtaagcgtccggccgctggatatgtttctgagccc

SEQ ID NO: 54511 - DNA, 50 bp, synthetic construct
  source 1..50: mol_type = other DNA
actcctttaatttgatttttcttgtacaacttatttgacagtaaataacg

SEQ ID NO: 54512 - DNA, 50 bp, synthetic construct
  source 1..50: mol_type = other DNA
ccgcgatcttgctctgcaaaatggccgccttttcgactgcatgatcgctg

SEQ ID NO: 54513 - DNA, 50 bp, synthetic construct
  source 1..50: mol_type = other DNA
cgcggacggcgtttctgatacttgtcagagtcgtggatacgccgattaca

SEQ ID NO: 54514 - DNA, 50 bp, synthetic construct
  source 1..50: mol_type = other DNA
gtgcctggccgcgaactgcggcgtcgaaccagcagaatttggctggcatc

SEQ ID NO: 54515 - DNA, 50 bp, synthetic construct
  source 1..50: mol_type = other DNA
agaaatgagcagaacagcagcacggtcaatctgctgctccgcttggatag

SEQ ID NO: 54516 - DNA, 50 bp, synthetic construct
  source 1..50: mol_type = other DNA
atccgagaatgttacctggggacagaccgctccagagcagaaagctggac

SEQ ID NO: 54517 - DNA, 50 bp, synthetic construct
  source 1..50: mol_type = other DNA
ggctgggcggatgcactcttcacgtccgtgaagtgaagttccacgcaggc

SEQ ID NO: 54518 - DNA, 50 bp, synthetic construct
  source 1..50: mol_type = other DNA
aaaaggcgagaaaggtggttggtatgtattcacatcctttctcgaagcgt

SEQ ID NO: 54519 - DNA, 50 bp, synthetic construct
  source 1..50: mol_type = other DNA
ccataggaacgtccgaccaaaaatccacggagcagcttacgctccagaac

SEQ ID NO: 54520 - DNA, 50 bp, synthetic construct
  source 1..50: mol_type = other DNA
agtaaaaatctaacaaatgttagaaatctaacaaatgtgaggttatccca

SEQ ID NO: 54521 - DNA, 50 bp, synthetic construct
  source 1..50: mol_type = other DNA
accgggtctgaataatattagatttgagaattttattattttctcctgat

SEQ ID NO: 54522 - DNA, 50 bp, synthetic construct
  source 1..50: mol_type = other DNA
ttgttgacatcaggctaaagagccttatcactttagtgcgataaatcact

SEQ ID NO: 54523 - DNA, 50 bp, synthetic construct
  source 1..50: mol_type = other DNA
tataagttccatcataagtgagcaatagcacacttatgatggaattgata

SEQ ID NO: 54524 - DNA, 50 bp, synthetic construct
  source 1..50: mol_type = other DNA
tatcgtggggacgctcgtatgcagatctgcacgagactttctcaaataga

SEQ ID NO: 54525 - DNA, 50 bp, synthetic construct
  source 1..50: mol_type = other DNA
gtccgttgaatagtataaaacgatcctgggctgattactattatattata

SEQ ID NO: 54526 - DNA, 50 bp, synthetic construct
  source 1..50: mol_type = other DNA
ctacctgcttcatagtatactcttttaaggctatacacaaacacctcttt

SEQ ID NO: 54527 - DNA, 50 bp, synthetic construct
  source 1..50: mol_type = other DNA
gtatatccatagaaaaatcaagtaattaaatgatttttgcaaggatcgat

SEQ ID NO: 54528 - DNA, 50 bp, synthetic construct
  source 1..50: mol_type = other DNA
cggatttacggaaacggctgtaaaatgatacagcccttcgcggcatagaa

SEQ ID NO: 54529 - DNA, 50 bp, synthetic construct
  source 1..50: mol_type = other DNA
tgaaagaagtgaattttttataataaattacaacaaatatatttacttct

SEQ ID NO: 54530 - DNA, 50 bp, synthetic construct
  source 1..50: mol_type = other DNA
aaaaacgcattataataaggaagaaaaaagcccctaaatacgcgggattc

SEQ ID NO: 54531 - DNA, 50 bp, synthetic construct
  source 1..50: mol_type = other DNA
aaagaaaatttccaagcaaatgatgagagtttttcaatgaaagcaaagaa

SEQ ID NO: 54532 - DNA, 50 bp, synthetic construct
  source 1..50: mol_type = other DNA
ttcacttttgctgcagtatttctttaactgaataatgggataaaataaaa

SEQ ID NO: 54533 - DNA, 50 bp, synthetic construct
  source 1..50: mol_type = other DNA
attgggtatcttgttgttatctatacagctatggcaacaagatacataag

SEQ ID NO: 54534 - DNA, 50 bp, synthetic construct
  source 1..50: mol_type = other DNA
tccaaaagaaagtaaccaccataccggctgctcggttacgagatctacac

SEQ ID NO: 54535 - DNA, 50 bp, synthetic construct
  source 1..50: mol_type = other DNA
gaaacgcctcaccactggattttgatgccaagttcttgatgaacgacgcc

SEQ ID NO: 54536 - DNA, 50 bp, synthetic construct
  source 1..50: mol_type = other DNA
acggtacgatgcggtggtggccgctatcgttgacttccggggcgtaaaga

SEQ ID NO: 54537 - DNA, 50 bp, synthetic construct
  source 1..50: mol_type = other DNA
gacggtacggaaatacaggcataacagattgccggattttgtaaagaagg

SEQ ID NO: 54538 - DNA, 50 bp, synthetic construct
  source 1..50: mol_type = other DNA
gaaaatctcatacgcctatgaaatcttttttctatgagcgcggaattttc

SEQ ID NO: 54539 - DNA, 50 bp, synthetic construct
  source 1..50: mol_type = other DNA
acaagctggaaaaattagtccttgatttattataccataatcagtcttgt

SEQ ID NO: 54540 - DNA, 50 bp, synthetic construct
  source 1..50: mol_type = other DNA
gctctggggatagtgttgcagccatattacaaagacagagaatatccccc

SEQ ID NO: 54541 - DNA, 50 bp, synthetic construct
  source 1..50: mol_type = other DNA
gcccggctggattggcggctggttggcaccctgttttgctcaagcgcgga

SEQ ID NO: 54542 - DNA, 50 bp, synthetic construct
  source 1..50: mol_type = other DNA
tatgtaaaaatgggtacaaaaataacataaaggctacccacacttatttt

SEQ ID NO: 54543 - DNA, 50 bp, synthetic construct
  source 1..50: mol_type = other DNA
aagataaaataaaaatttttgaggtatctttcgaattttatcttagttta

SEQ ID NO: 54544 - DNA, 50 bp, synthetic construct
  source 1..50: mol_type = other DNA
gggaaagaagtctagaaatagacttcgtattatatcacaacctcttgttt

SEQ ID NO: 54545 - DNA, 50 bp, synthetic construct
  source 1..50: mol_type = other DNA
tagaaatagacttctttttttgttgcaacagcaaaagaacaactatttaa

SEQ ID NO: 54546 - DNA, 50 bp, synthetic construct
  source 1..50: mol_type = other DNA
catttatttattctcaaaataaggtggtttcacccgaaaatgaaaccata

SEQ ID NO: 54547 - DNA, 50 bp, synthetic construct
  source 1..50: mol_type = other DNA
agcaatgaaaaaagcaatagtaattgacctttattgcttttggcattgag

SEQ ID NO: 54548 - DNA, 50 bp, synthetic construct
  source 1..50: mol_type = other DNA
ttaaagcggcaccacaccgctgctcgatcagagcgatcctgcacatttaa

SEQ ID NO: 54549 - DNA, 50 bp, synthetic construct
  source 1..50: mol_type = other DNA
accggggcagaggattacctgttgacaaaagtggatacaatcgacccgac

SEQ ID NO: 54550 - DNA, 50 bp, synthetic construct
  source 1..50: mol_type = other DNA
gttttaagtttgttgcaagccgttgcagactgcggctcaccgcagaaaac

SEQ ID NO: 54551 - DNA, 50 bp, synthetic construct
  source 1..50: mol_type = other DNA
ctgcattgctattcccccttcattttcatattgggcgacaagagcggcgg

SEQ ID NO: 54552 - DNA, 50 bp, synthetic construct
  source 1..50: mol_type = other DNA
tgggtctgcgctctgctttgataactgtaacaaataattacatttactta

SEQ ID NO: 54553 - DNA, 50 bp, synthetic construct
  source 1..50: mol_type = other DNA
atatatcactcttaatcggtaataagtatttttcattcttcaggatattt

SEQ ID NO: 54554 - DNA, 50 bp, synthetic construct
  source 1..50: mol_type = other DNA
ttcgcttttcatcggttttacggttttccggtaaaggtttcaaaacctaa

SEQ ID NO: 54555 - DNA, 50 bp, synthetic construct
  source 1..50: mol_type = other DNA
ggagccatcgaaatgtggcaaggtcacctgcacattgtttgcaaccgtcc

SEQ ID NO: 54556 - DNA, 50 bp, synthetic construct
  source 1..50: mol_type = other DNA
ctacttatattctttcaaaaattttacgatgaatgtagccatgtatttac

SEQ ID NO: 54557 - DNA, 50 bp, synthetic construct
  source 1..50: mol_type = other DNA
cgggttgcagcctactgccgtgtatcaacagggcagtcggcagggagtgc

SEQ ID NO: 54558 - DNA, 50 bp, synthetic construct
  source 1..50: mol_type = other DNA
tgcagaacaggacagagatatcaatatctgcctcaccggagaggacggcg

SEQ ID NO: 54559 - DNA, 50 bp, synthetic construct
  source 1..50: mol_type = other DNA
ttatctgaatctccaaattctgccacggcagatttatgcagttcagtttt

SEQ ID NO: 54560 - DNA, 50 bp, synthetic construct
  source 1..50: mol_type = other DNA
ttttcttttgttttcccattgcgcatgtatttaccgaaaacagaatgaac

SEQ ID NO: 54561 - DNA, 50 bp, synthetic construct
  source 1..50: mol_type = other DNA
taaaaggctataaagtccagccattaacacagcaaaaattggtccttttt

SEQ ID NO: 54562 - DNA, 50 bp, synthetic construct
  source 1..50: mol_type = other DNA
cgtattgccgtgtcagcacttttcgcttgcgaaaaagacgttggaaagcc

SEQ ID NO: 54563 - DNA, 50 bp, synthetic construct
  source 1..50: mol_type = other DNA
tcgctcgccctgcaaagcagggccgtaatgctgccatgcagacggcaaag

SEQ ID NO: 54564 - DNA, 50 bp, synthetic construct
  source 1..50: mol_type = other DNA
cagaaagcaattgaaggcgcagtcgagactgtatctgtaatctgtttctg

SEQ ID NO: 54565 - DNA, 50 bp, synthetic construct
  source 1..50: mol_type = other DNA
gttatttccggcattatttctacatatggagaaaaaactaatacgatata

SEQ ID NO: 54566 - DNA, 50 bp, synthetic construct
  source 1..50: mol_type = other DNA
agcgtatttacgggcttttttgagatgtaaaaaaaggtttaaaaatgaaa

SEQ ID NO: 54567 - DNA, 50 bp, synthetic construct
  source 1..50: mol_type = other DNA
gcctgttttactggattgtcaaaatattgtataataacactacaaaagga

SEQ ID NO: 54568 - DNA, 50 bp, synthetic construct
  source 1..50: mol_type = other DNA
agattttcgcggactttttaccggagaaaacaaacggtatcggaaaaaag

SEQ ID NO: 54569 - DNA, 50 bp, synthetic construct
  source 1..50: mol_type = other DNA
gcatgtttactaacgataatgtgttattttttgtaagttgataaacaata

SEQ ID NO: 54570 - DNA, 50 bp, synthetic construct
  source 1..50: mol_type = other DNA
acctttctggggtggcaaaacagaaagccttttctgaaacccgcaaagtc

SEQ ID NO: 54571 - DNA, 50 bp, synthetic construct
  source 1..50: mol_type = other DNA
tcttcggctctaaggtctggaactcgatgggcagaccgctccagggcaga

SEQ ID NO: 54572 - DNA, 50 bp, synthetic construct
  source 1..50: mol_type = other DNA
tgtggctctggtaatgaacggtatcgcaggcgttcaaaatcagaaccaca

SEQ ID NO: 54573 - DNA, 50 bp, synthetic construct
  source 1..50: mol_type = other DNA
ctctctccgctttcttacttttctgtgcgccgacacgcacgcggactttc

SEQ ID NO: 54574 - DNA, 50 bp, synthetic construct
  source 1..50: mol_type = other DNA
ccgaaatatattacataatgaaaagcattttcagatgtagtatcagcttt

SEQ ID NO: 54575 - DNA, 50 bp, synthetic construct
  source 1..50: mol_type = other DNA
gtcggatgaggtcataataaccccccggaaaggagctgatttcatgcgaa

SEQ ID NO: 54576 - DNA, 50 bp, synthetic construct
  source 1..50: mol_type = other DNA
aggaaatccgccccatccatgccgggtcgccggttatgcgcgtgtttcca

SEQ ID NO: 54577 - DNA, 50 bp, synthetic construct
  source 1..50: mol_type = other DNA
atttgcgtacaaaaaatacacctgtaaaatcagcatttccttctgcaaat

SEQ ID NO: 54578 - DNA, 50 bp, synthetic construct
  source 1..50: mol_type = other DNA
caattctctttcatttttctgctcattatgcagaaaatgatagactgcga

SEQ ID NO: 54579 - DNA, 50 bp, synthetic construct
  source 1..50: mol_type = other DNA
tcgattttattgataattcgcacgaacgcaagaataatcatgacagcagc

SEQ ID NO: 54580 - DNA, 50 bp, synthetic construct
  source 1..50: mol_type = other DNA
ggacaggctttcctttgaggatatcaatggaaacacagagcagttccgct

SEQ ID NO: 54581 - DNA, 50 bp, synthetic construct
  source 1..50: mol_type = other DNA
tgacgaaatggatcatcatatttcttttagcttggcgatgaatttctttt

SEQ ID NO: 54582 - DNA, 50 bp, synthetic construct
  source 1..50: mol_type = other DNA
aaccccttatatatcaacgattacaacgaactattcctatcaatcgggac

SEQ ID NO: 54583 - DNA, 50 bp, synthetic construct
  source 1..50: mol_type = other DNA
ccggatgagcatttgcatgcaaacaacagctcatggaaattcaaataagg

SEQ ID NO: 54584 - DNA, 50 bp, synthetic construct
  source 1..50: mol_type = other DNA
gtatgatcattcggaaacctctccatggaaaatgtaaagaatatacatac

SEQ ID NO: 54585 - DNA, 50 bp, synthetic construct
  source 1..50: mol_type = other DNA
gtcagtaaagtacgtccccacagtgaactgttgttctgtgcttggctgtt

SEQ ID NO: 54586 - DNA, 50 bp, synthetic construct
  source 1..50: mol_type = other DNA
cggatttacagaaaacttccgtaaagctcaagaaatcctcgataaaaatc

SEQ ID NO: 54587 - DNA, 50 bp, synthetic construct
  source 1..50: mol_type = other DNA
gttatggtacaatatatatgtttttaaagaaataaccgccctacgggaat

SEQ ID NO: 54588 - DNA, 50 bp, synthetic construct
  source 1..50: mol_type = other DNA
gagccggagaggttcttcagcaggatccgcaaaaagaaaaagtgtgacta

SEQ ID NO: 54589 - DNA, 50 bp, synthetic construct
  source 1..50: mol_type = other DNA
ggcggctttcatttcatccgtccaactggatcattgacccggaggccgct

SEQ ID NO: 54590 - DNA, 50 bp, synthetic construct
  source 1..50: mol_type = other DNA
ttacgattgtcttttccattgtatccctacaaggtacaggacaacgagga

SEQ ID NO: 54591 - DNA, 50 bp, synthetic construct
  source 1..50: mol_type = other DNA
ggttttttttgtttaaaaatgaaaatatttactgttctttcaaaaaagtc

SEQ ID NO: 54592 - DNA, 50 bp, synthetic construct
  source 1..50: mol_type = other DNA
ctatccgggctgcttatcttgtactgtgatgggacaagggttccggatac

SEQ ID NO: 54593 - DNA, 50 bp, synthetic construct
  source 1..50: mol_type = other DNA
gccagccgccctcctacggtcaggaaacagaccctctcggcagattgttt

SEQ ID NO: 54594 - DNA, 50 bp, synthetic construct
  source 1..50: mol_type = other DNA
ggtcaggaattttattgaatttgaggaaaaaggccattgccgaactggac

SEQ ID NO: 54595 - DNA, 50 bp, synthetic construct
  source 1..50: mol_type = other DNA
cattcataagcttatcaacttcttttttgaagaacatattgttattaatc

SEQ ID NO: 54596 - DNA, 50 bp, synthetic construct
  source 1..50: mol_type = other DNA
ttggtggcagtcagcttcagcgttttaacgaactttctataaacgacaaa

SEQ ID NO: 54597 - DNA, 50 bp, synthetic construct
  source 1..50: mol_type = other DNA
atctgcggcaaagttatccgaacccgtatgggatgtggtttgccatgttc

SEQ ID NO: 54598 - DNA, 50 bp, synthetic construct
  source 1..50: mol_type = other DNA
cagggagtgtgatatactgacccctgccgaaaagtgcttgacaaaatgcg

SEQ ID NO: 54599 - DNA, 50 bp, synthetic construct
  source 1..50: mol_type = other DNA
tgcgaaaatcaagtcaagaggaatcacgaagtcttgacttgattttttta

SEQ ID NO: 54600 - DNA, 50 bp, synthetic construct
  source 1..50: mol_type = other DNA
taaacacattacttatatttcaaaaacgtgtttcataagttcaccgtttg

SEQ ID NO: 54601 - DNA, 50 bp, synthetic construct
  source 1..50: mol_type = other DNA
cctgatctgaatttccacaagccttaaatcttctcaaaaaagtgatatta

SEQ ID NO: 54602 - DNA, 50 bp, synthetic construct
  source 1..50: mol_type = other DNA
acatttatctgcatggctttcatctcgtagaaatatatgcggacgaaggc

SEQ ID NO: 54603 - DNA, 50 bp, synthetic construct
  source 1..50: mol_type = other DNA
attatacctctggtgcccccttacaattataaacgcttttcaggtttctg

SEQ ID NO: 54604 - DNA, 50 bp, synthetic construct
  source 1..50: mol_type = other DNA
ctcgataccgggctgaccacgcaactttttcatgagtgcctcctatatgc

SEQ ID NO: 54605 - DNA, 50 bp, synthetic construct
  source 1..50: mol_type = other DNA
acggccgctgtggactccgggagctagctcaattggttagagctgtccgc

SEQ ID NO: 54606 - DNA, 50 bp, synthetic construct
  source 1..50: mol_type = other DNA
gctttttatttatacaaggtaagaattgtctgcttcaggttatcaaaaaa

SEQ ID NO: 54607 - DNA, 50 bp, synthetic construct
  source 1..50: mol_type = other DNA
taataaatctgtttccatcctttctactaacatatgtgacaactttattt

SEQ ID NO: 54608 - DNA, 50 bp, synthetic construct
  source 1..50: mol_type = other DNA
gctgaggagtcgaacagggcggcagttaagatcacgttacacacctcctg

SEQ ID NO: 54609 - DNA, 50 bp, synthetic construct
  source 1..50: mol_type = other DNA
gctgtaaagtcaacagatttcggagaatcgaaatcgtttcacttgctcca

SEQ ID NO: 54610 - DNA, 50 bp, synthetic construct
  source 1..50: mol_type = other DNA
cggcaaatcaggaaggaggaacgccggtgttccttcaggtagcgttgccg

SEQ ID NO: 54611 - DNA, 50 bp, synthetic construct
  source 1..50: mol_type = other DNA
atgccatagtttacctccaatagaaagggatgtatgggaaaccctggtaa

SEQ ID NO: 54612 - DNA, 50 bp, synthetic construct
  source 1..50: mol_type = other DNA
acagtttccgattacaaaagtacgatcgtacatttgtaactagaaaagat

SEQ ID NO: 54613 - DNA, 50 bp, synthetic construct
  source 1..50: mol_type = other DNA
aaaagtaacagtatacggctatcaattgataggcttggaaggtaacagga

SEQ ID NO: 54614 - DNA, 50 bp, synthetic construct
  source 1..50: mol_type = other DNA
atggagtaaaaagctgatcgtcacttgtccagagaggatttttccaaaat

SEQ ID NO: 54615 - DNA, 50 bp, synthetic construct
  source 1..50: mol_type = other DNA
agcgcaggtcgtcccgcacctgctccagctggtccaggatctacacgatg

SEQ ID NO: 54616 - DNA, 50 bp, synthetic construct
  source 1..50: mol_type = other DNA
taacagatgaatttccactgaaacgttagagttcttttattcaataggta

SEQ ID NO: 54617 - DNA, 50 bp, synthetic construct
  source 1..50: mol_type = other DNA
aaaaggtgcggacagggtataaggcggctttgtctgattccggtaattat

SEQ ID NO: 54618 - DNA, 50 bp, synthetic construct
  source 1..50: mol_type = other DNA
gtgtcagaaaattgatagaagaagaaaggatgataagaatggcaagaagc

SEQ ID NO: 54619 - DNA, 50 bp, synthetic construct
  source 1..50: mol_type = other DNA
tcttacgtattctttcgctttttctagaaaaatagaaaggttgtgtatat

SEQ ID NO: 54620 - DNA, 50 bp, synthetic construct
  source 1..50: mol_type = other DNA
atcttttctagttacaaatgtacgatcgtacttttgtaatcggaaactgt

SEQ ID NO: 54621 - DNA, 50 bp, synthetic construct
  source 1..50: mol_type = other DNA
tttcttcttataataatgcaaccttaaggataacggaaaagaagaaaagc

SEQ ID NO: 54622 - DNA, 50 bp, synthetic construct
  source 1..50: mol_type = other DNA
aaaattcatctcgctgccctcgactcatttttacggaaaggatgatattt

SEQ ID NO: 54623 - DNA, 50 bp, synthetic construct
  source 1..50: mol_type = other DNA
cgacgacaaagaaaaaaacgcgatcgatgaggttcttttcctacggacga

SEQ ID NO: 54624 - DNA, 50 bp, synthetic construct
  source 1..50: mol_type = other DNA
ctccggcgaacatgcggtcgagcgcccgtcaggtattaacgaagctacca

SEQ ID NO: 54625 - DNA, 50 bp, synthetic construct
  source 1..50: mol_type = other DNA
tactactaactgaacccctccggtcgatacagtcttttttgtttcataca

SEQ ID NO: 54626 - DNA, 50 bp, synthetic construct
  source 1..50: mol_type = other DNA
cgcatttctttcatcaggcggctcacccggatgttactgaacgcaatcga

SEQ ID NO: 54627 - DNA, 50 bp, synthetic construct
  source 1..50: mol_type = other DNA
tacactctacagtgcgtagaatccgcagattgtacttgctattattggct

SEQ ID NO: 54628 - DNA, 50 bp, synthetic construct
  source 1..50: mol_type = other DNA
gtatgatgccggatgcaggtatgtaaggatacctgattccgttatcagcg

SEQ ID NO: 54629 - DNA, 50 bp, synthetic construct
  source 1..50: mol_type = other DNA
tgactgtcctgcggatgtccttctgacaagggaaatccgcagagcttcgc

SEQ ID NO: 54630 - DNA, 50 bp, synthetic construct
  source 1..50: mol_type = other DNA
tagtccctttatttctttctccgttaacgacgaaatttttaggagggtca

SEQ ID NO: 54631 - DNA, 50 bp, synthetic construct
  source 1..50: mol_type = other DNA
tataatataatagtaatcagccctggatcactttatactattcaacgggc

SEQ ID NO: 54632 - DNA, 50 bp, synthetic construct
  source 1..50: mol_type = other DNA
taaacgccaagaatagcaagtaaaattgtaactgtaattcagaagtttta

SEQ ID NO: 54633 - DNA, 50 bp, synthetic construct
  source 1..50: mol_type = other DNA
agataccctgcagtaagcagccaccttgactattttactaaagtgtaatg

SEQ ID NO: 54634 - DNA, 50 bp, synthetic construct
  source 1..50: mol_type = other DNA
tcgtccgtaagaaaagaacctcatcgatcgcgtttttttctttgtcgtcg

SEQ ID NO: 54635 - DNA, 50 bp, synthetic construct
  source 1..50: mol_type = other DNA
cagtgcaatatatgcataaatctgcgcattattatctatataagcgatta

SEQ ID NO: 54636 - DNA, 50 bp, synthetic construct
  source 1..50: mol_type = other DNA
cgtaagcgcagagcacacacacccacggatgtggtggtatgccgcgtatg

SEQ ID NO: 54637 - DNA, 50 bp, synthetic construct
  source 1..50: mol_type = other DNA
tcgtccgtaggaaaagaacctcatcgatatatttattagacaacggaatg

SEQ ID NO: 54638 - DNA, 50 bp, synthetic construct
  source 1..50: mol_type = other DNA
tattcaagcccattcaatgtaacgataatcactaccgatatgattgaata

SEQ ID NO: 54639 - DNA, 50 bp, synthetic construct
  source 1..50: mol_type = other DNA
taaaagaaatatgccagcctataaagttacggatttggccatttcttttc

SEQ ID NO: 54640 - DNA, 50 bp, synthetic construct
  source 1..50: mol_type = other DNA
cagcttttttattgtatccaaataaacgcttcagaaatataaaaaagcgc

SEQ ID NO: 54641 - DNA, 50 bp, synthetic construct
  source 1..50: mol_type = other DNA
gagcggaagtatatgcgaaggtaaaataacgaaaacatatacaaacggga

SEQ ID NO: 54642 - DNA, 50 bp, synthetic construct
  source 1..50: mol_type = other DNA
gtttaaaatatgtgaaaatgggtacaagaagattttcgcattttggaata

SEQ ID NO: 54643 - DNA, 50 bp, synthetic construct
  source 1..50: mol_type = other DNA
taatcagcaatcattaacatagtaactacacccttaaggatcccgatttt

SEQ ID NO: 54644 - DNA, 50 bp, synthetic construct
  source 1..50: mol_type = other DNA
gaggtaatttttttgtatctatcatatgataagcccgttcatagcatgtc

SEQ ID NO: 54645 - DNA, 50 bp, synthetic construct
  source 1..50: mol_type = other DNA
tggtcggtcacgaagaaggtaaatgcagcttcctcgtcaatgaccgcctt

SEQ ID NO: 54646 - DNA, 50 bp, synthetic construct
  source 1..50: mol_type = other DNA
gatgtaacgagagccggcatctcctcggaggtgacttttctgacgttgtt

SEQ ID NO: 54647 - DNA, 50 bp, synthetic construct
  source 1..50: mol_type = other DNA
tcgggatattccataggaacgtccgacgtagttcaggacgaacgggccga

SEQ ID NO: 54648 - DNA, 50 bp, synthetic construct
  source 1..50: mol_type = other DNA
tatacaccgcaggaaatcagatccaccgatgtattcgaagatgatatggt

SEQ ID NO: 54649 - DNA, 50 bp, synthetic construct
  source 1..50: mol_type = other DNA
actggtctcctcccttcttttttttgctcaaacggcgaaaggaggtgata

SEQ ID NO: 54650 - DNA, 50 bp, synthetic construct
  source 1..50: mol_type = other DNA
agatactgatttgtgagaatgaagtttttcaaattgaccaattatgtaat

SEQ ID NO: 54651 - DNA, 50 bp, synthetic construct
  source 1..50: mol_type = other DNA
atcttattaagtcagccagtatacatgtgaggttatcccagaaatcaggg

SEQ ID NO: 54652 - DNA, 50 bp, synthetic construct
  source 1..50: mol_type = other DNA
aaacacctctcctttccaaaatagcccttatttgttctgcagccgtttca

SEQ ID NO: 54653 - DNA, 50 bp, synthetic construct
  source 1..50: mol_type = other DNA
ccttgtaccaaatcggccagttgtgccgaacatgcccggcccctacaacg

SEQ ID NO: 54654 - DNA, 50 bp, synthetic construct
  source 1..50: mol_type = other DNA
aggaggaaaaaggaatgaacagaacactctgttcaaggactcctctcagg

SEQ ID NO: 54655 - DNA, 50 bp, synthetic construct
  source 1..50: mol_type = other DNA
atatctatgccaagaccgccacggtgccgtggctgttgccgcaggtgccg

SEQ ID NO: 54656 - DNA, 50 bp, synthetic construct
  source 1..50: mol_type = other DNA
ggtatttcagaattatcagaataagcttttctgcataaatctgacaagtt

SEQ ID NO: 54657 - DNA, 50 bp, synthetic construct
  source 1..50: mol_type = other DNA
gtcttgttatgccttctcttttggctttccgcaagtgtccataatgcccg

SEQ ID NO: 54658 - DNA, 50 bp, synthetic construct
  source 1..50: mol_type = other DNA
tcagcccgtggttgggtatattacatggattatctaaaatactgggaagt

SEQ ID NO: 54659 - DNA, 50 bp, synthetic construct
  source 1..50: mol_type = other DNA
cttaatggttcatatcagttgacgatcgtttgtcaggttgagggattaag

SEQ ID NO: 54660 - DNA, 50 bp, synthetic construct
  source 1..50: mol_type = other DNA
tgcaaatacgacctctttttgttttaaatatgcaagaaaaggtatgggca

SEQ ID NO: 54661 - DNA, 50 bp, synthetic construct
  source 1..50: mol_type = other DNA
tttccctctatagtatgaaactccttaagttttcatagacgccaaagaaa

SEQ ID NO: 54662 - DNA, 50 bp, synthetic construct
  source 1..50: mol_type = other DNA
ttctgtggtcatttcttttacttctgcagataagaatattctcaacagaa

SEQ ID NO: 54663 - DNA, 50 bp, synthetic construct
  source 1..50: mol_type = other DNA
tgtggcaatgtatagaaaaatagggcgcaaaatgttgcctttttgacata

SEQ ID NO: 54664 - DNA, 50 bp, synthetic construct
  source 1..50: mol_type = other DNA
ggtggtgcgtgagatcttccgcaaggtggccgatgatggagcgcgatttg

SEQ ID NO: 54665 - DNA, 50 bp, synthetic construct
  source 1..50: mol_type = other DNA
cagttgttagccagtttccctaaagcactagtattcttgccttaacactc

SEQ ID NO: 54666 - DNA, 50 bp, synthetic construct
  source 1..50: mol_type = other DNA
cgttctaacacatattccttgtcacctgaacctggggatgcggacggtga

SEQ ID NO: 54667 - DNA, 50 bp, synthetic construct
  source 1..50: mol_type = other DNA
gaaagccaataatagcaagtacaatcttttactatctcttttgttctttc

SEQ ID NO: 54668 - DNA, 50 bp, synthetic construct
  source 1..50: mol_type = other DNA
cccagctaaccagttcatctaccttgagcttgaggaacatgcgggcgcgg

SEQ ID NO: 54669 - DNA, 50 bp, synthetic construct
  source 1..50: mol_type = other DNA
tagaggtattctgcctgcagcctcggagggccgcaggcagaaggcccgcg

SEQ ID NO: 54670 - DNA, 50 bp, synthetic construct
  source 1..50: mol_type = other DNA
ttcggcattatttccgcgaacaagggctccttcctcatcggcgtgctcga

SEQ ID NO: 54671 - DNA, 50 bp, synthetic construct
  source 1..50: mol_type = other DNA
tccatctttctcataagaggaaatattttttgccggataagagcgatgat

SEQ ID NO: 54672 - DNA, 50 bp, synthetic construct
  source 1..50: mol_type = other DNA
tgagaatgtcggaaaaggagtatttaaataagaattaactaacagaattt

SEQ ID NO: 54673 - DNA, 50 bp, synthetic construct
  source 1..50: mol_type = other DNA
aaacgtgccccagtttaaagagatggtagtctttcggatggggcatattg

SEQ ID NO: 54674 - DNA, 50 bp, synthetic construct
  source 1..50: mol_type = other DNA
ggttacggctgattgatggcgtcggcagtgcccatgacgatgccgatacg

SEQ ID NO: 54675 - DNA, 50 bp, synthetic construct
  source 1..50: mol_type = other DNA
tggattaaagagcatatcttccagccccggaaacgttgatttctagggct

SEQ ID NO: 54676 - DNA, 50 bp, synthetic construct
  source 1..50: mol_type = other DNA
aactatatattctatagcccaatgtaatagaaaaaataatatatatagta

SEQ ID NO: 54677 - DNA, 50 bp, synthetic construct
  source 1..50: mol_type = other DNA
agttcctgcagaacatccagcttgcggaagctgtaaactctacgaataaa

SEQ ID NO: 54678 - DNA, 50 bp, synthetic construct
  source 1..50: mol_type = other DNA
atgatctgattgatattgatgaatatacccatttttaaggagatgatcat

SEQ ID NO: 54679 - DNA, 50 bp, synthetic construct
  source 1..50: mol_type = other DNA
cgactacgccgacaaagaaaaccgctcttttttattcttccgcgtcgagc

SEQ ID NO: 54680 - DNA, 50 bp, synthetic construct
  source 1..50: mol_type = other DNA
aggccgtagtgaatgaagaacaggctaaggtatttgaatctgtaaagcct

SEQ ID NO: 54681 - DNA, 50 bp, synthetic construct
  source 1..50: mol_type = other DNA
tgatataataaatttcactattagtgataatgtcgaggtaaaagcgctca

SEQ ID NO: 54682 - DNA, 50 bp, synthetic construct
  source 1..50: mol_type = other DNA
ggagggaacccaaaatggcagaacgcactgggcgtttttgtgttcatgtg

SEQ ID NO: 54683 - DNA, 50 bp, synthetic construct
  source 1..50: mol_type = other DNA
gctgttctattgtctttggcatattccctgtctgccatcagctctgaggt

SEQ ID NO: 54684 - DNA, 50 bp, synthetic construct
  source 1..50: mol_type = other DNA
gttcttcgcatttttcatattcgcggcttttcatggcttatgtcaggaac

SEQ ID NO: 54685 - DNA, 50 bp, synthetic construct
  source 1..50: mol_type = other DNA
atttctgtacaataaagcatatctttatatataaaatattgaaaaactat

SEQ ID NO: 54686 - DNA, 50 bp, synthetic construct
  source 1..50: mol_type = other DNA
aaatagctgaattagttaaggtttagtattcgatgttaatacacctatta

SEQ ID NO: 54687 - DNA, 50 bp, synthetic construct
  source 1..50: mol_type = other DNA
aagccatacgaagtcctcctttttcgaaaaataagggtttccaggggaaa

SEQ ID NO: 54688 - DNA, 50 bp, synthetic construct
  source 1..50: mol_type = other DNA
tcgttgttacattctttgccacatctccacgtcaaagcatattcttgata

SEQ ID NO: 54689 - DNA, 50 bp, synthetic construct
  source 1..50: mol_type = other DNA
ccgggagagaaaggaacgcagcgtctacgcggcgtttctttttgctgttt

SEQ ID NO: 54690 - DNA, 50 bp, synthetic construct
  source 1..50: mol_type = other DNA
tatggttatcctgtttatcctaatgagtatggctaaacaggataactata

SEQ ID NO: 54691 - DNA, 50 bp, synthetic construct
  source 1..50: mol_type = other DNA
gtaatgaaatagattgtgtcagaaaattctacttgcttttattggctttt

SEQ ID NO: 54692 - DNA, 50 bp, synthetic construct
  source 1..50: mol_type = other DNA
tgctatggctgttttgctgtttatgcagtcttcagaaaattattggagct

SEQ ID NO: 54693 - DNA, 50 bp, synthetic construct
  source 1..50: mol_type = other DNA
agttggatgacaacggaacattcctgggtatttttgcatcaagaatcctt

SEQ ID NO: 54694 - DNA, 50 bp, synthetic construct
  source 1..50: mol_type = other DNA
ccgctattccaaaaaagcagaaacggctttttgcttatacggcatagctt

SEQ ID NO: 54695 - DNA, 50 bp, synthetic construct
  source 1..50: mol_type = other DNA
gcttcgcgctggcgtgcgagctggccacagcaatcacagcggagcgatac

SEQ ID NO: 54696 - DNA, 50 bp, synthetic construct
  source 1..50: mol_type = other DNA
gaatgtggtgtatgtgcatgtcatgtttgagatgaaaatccatcacattc

SEQ ID NO: 54697 - DNA, 50 bp, synthetic construct
  source 1..50: mol_type = other DNA
aaattacggttctttgccaattaaaaaattgtatcaaagacggcttttag

SEQ ID NO: 54698 - DNA, 50 bp, synthetic construct
  source 1..50: mol_type = other DNA
aaaggttatgtaatgaattggctattctaaattgtccgaagctgaacaaa

SEQ ID NO: 54699 - DNA, 50 bp, synthetic construct
  source 1..50: mol_type = other DNA
actacctgtaccagcattattaagcacttaaccagtacaaagcaggtaaa

SEQ ID NO: 54700 - DNA, 50 bp, synthetic construct
  source 1..50: mol_type = other DNA
attctctaaatatgaagaattaaaaatagtatatcacatcgttaataaaa

SEQ ID NO: 54701 - DNA, 50 bp, synthetic construct
  source 1..50: mol_type = other DNA
agtttgttgcaagccgttgcaagttcttgttaaacggattgccccggctg

SEQ ID NO: 54702 - DNA, 50 bp, synthetic construct
  source 1..50: mol_type = other DNA
gtccaagcggccttcatggattctcttagaagcatgaaaaccgactacca

SEQ ID NO: 54703 - DNA, 50 bp, synthetic construct
  source 1..50: mol_type = other DNA
cgattttctctactgttttcaatgaatcttgaaaaatataaggagtatgc

SEQ ID NO: 54704 - DNA, 50 bp, synthetic construct
  source 1..50: mol_type = other DNA
catcatccaagccaaataagtcaagctacattctttggaacaggaagatt

SEQ ID NO: 54705 - DNA, 50 bp, synthetic construct
  source 1..50: mol_type = other DNA
tggaaatataaagtaccattcagtatagaaggaggctctttttatgccta

SEQ ID NO: 54706 - DNA, 50 bp, synthetic construct
  source 1..50: mol_type = other DNA
atgccgaaagtgaccgtgatcccggccgggattccggcgatattctccaa

SEQ ID NO: 54707 - DNA, 50 bp, synthetic construct
  source 1..50: mol_type = other DNA
tgcgggcgctttttcaatgttccggcctaccgaactgcaaagcgcccgca

SEQ ID NO: 54708 - DNA, 50 bp, synthetic construct
  source 1..50: mol_type = other DNA
ctgacgcttcgagaaaggatgtgaattctcctcctaaccattagagtcct

SEQ ID NO: 54709 - DNA, 50 bp, synthetic construct
  source 1..50: mol_type = other DNA
tcatacttactgctccttcctattctaatgagaagaacttatcaataagc

SEQ ID NO: 54710 - DNA, 50 bp, synthetic construct
  source 1..50: mol_type = other DNA
caaagctgtgcaggatattttcctgcgcgaagaccacctgtacagatttc

SEQ ID NO: 54711 - DNA, 50 bp, synthetic construct
  source 1..50: mol_type = other DNA
tccggttcctgccgcagtattttccggataaaatatctggtcggcggaaa

SEQ ID NO: 54712 - DNA, 50 bp, synthetic construct
  source 1..50: mol_type = other DNA
gcggctcccgccggcgtgtcccatatggcagatacatgggcgactgcgcc

SEQ ID NO: 54713 - DNA, 50 bp, synthetic construct
  source 1..50: mol_type = other DNA
catccttgttcaggaattgaacgtaaacgttaaatttgcgataaagattg

SEQ ID NO: 54714 - DNA, 50 bp, synthetic construct
  source 1..50: mol_type = other DNA
acatggaactgggtgagatcgtacctccgggctctcccccgcctccatca

SEQ ID NO: 54715 - DNA, 50 bp, synthetic construct
  source 1..50: mol_type = other DNA
agcccgaacacttcccggagcaagcttcacgtcgtggaagatgtcgagct

SEQ ID NO: 54716 - DNA, 50 bp, synthetic construct
  source 1..50: mol_type = other DNA
ttctttgtttcgatatactctttttgaaatatgcacaccgaaacaaaaac

SEQ ID NO: 54717 - DNA, 50 bp, synthetic construct
  source 1..50: mol_type = other DNA
tttctttgcccattcagccatgagcgcgcttgaatggggttcaagaggcc

SEQ ID NO: 54718 - DNA, 50 bp, synthetic construct
  source 1..50: mol_type = other DNA
cgtctatctcttttcgcagcaccttatttgtaaaaggaaaaagtgtgact

SEQ ID NO: 54719 - DNA, 50 bp, synthetic construct
  source 1..50: mol_type = other DNA
tttgactgttttatttgccatgatttgttatgataaataacctttattct

SEQ ID NO: 54720 - DNA, 50 bp, synthetic construct
  source 1..50: mol_type = other DNA
aacccctataaaataaggccttatcatcacaaagcctttatttaaagcta

SEQ ID NO: 54721 - DNA, 50 bp, synthetic construct
  source 1..50: mol_type = other DNA
tcatctccctgatgaaagcacagaaaggagtgatttcatggctaaaatca

SEQ ID NO: 54722 - DNA, 50 bp, synthetic construct
  source 1..50: mol_type = other DNA
gcacggaaatcaaagcataacagaattcttttctgtaccttttcgtcagc

SEQ ID NO: 54723 - DNA, 50 bp, synthetic construct
  source 1..50: mol_type = other DNA
agcgattggagcgatgagaatgatttctcatcaccatcttcatgatacaa

SEQ ID NO: 54724 - DNA, 50 bp, synthetic construct
  source 1..50: mol_type = other DNA
cccacgcttatacaatactcgctggtcagatatacttgtgtcaggtatat

SEQ ID NO: 54725 - DNA, 50 bp, synthetic construct
  source 1..50: mol_type = other DNA
tgcagaaattgaaagacctatatttgaatggagttgataaaatgcgacgt

SEQ ID NO: 54726 - DNA, 50 bp, synthetic construct
  source 1..50: mol_type = other DNA
cagcaggcgtgttttcttattctatgatagttgagggtgctttcctgctg

SEQ ID NO: 54727 - DNA, 50 bp, synthetic construct
  source 1..50: mol_type = other DNA
caacaattctttttgatgtaccgcaagcggtaattcaaaagaaagagaac

SEQ ID NO: 54728 - DNA, 50 bp, synthetic construct
  source 1..50: mol_type = other DNA
gtcaataggtttttgaactcataggttgcgtttttcaagaagaatccgta

SEQ ID NO: 54729 - DNA, 50 bp, synthetic construct
  source 1..50: mol_type = other DNA
tagcaaggattataagtagaatatgcacatcctacgaatatcgtttgatc

SEQ ID NO: 54730 - DNA, 50 bp, synthetic construct
  source 1..50: mol_type = other DNA
tgtgaagccgctattttagtgcatttattgactcatcttgaattaagatg

SEQ ID NO: 54731 - DNA, 50 bp, synthetic construct
  source 1..50: mol_type = other DNA
accttgtactttttcaactgcccggatcagcatttgggaatcgggaacag

SEQ ID NO: 54732 - DNA, 50 bp, synthetic construct
  source 1..50: mol_type = other DNA
actcatacacaaacgcccgcactggcctttcgggtatattgtatgtgata

SEQ ID NO: 54733 - DNA, 50 bp, synthetic construct
  source 1..50: mol_type = other DNA
gcctcaaattcttcctgtgaaatgataatttctaagaccgattacgaaaa

SEQ ID NO: 54734 - DNA, 50 bp, synthetic construct
  source 1..50: mol_type = other DNA
attcaagcgcgctaccaaaactgcgctctggtttcccttcacgccggaac

SEQ ID NO: 54735 - DNA, 50 bp, synthetic construct
  source 1..50: mol_type = other DNA
aatgcaggaaatgggtctggaatacggagaccagaacttagtcctccatt

SEQ ID NO: 54736 - DNA, 50 bp, synthetic construct
  source 1..50: mol_type = other DNA
cagtgccagaattcggcaaatgcgtaacgatttgaagatttctgtcaatg

SEQ ID NO: 54737 - DNA, 50 bp, synthetic construct
  source 1..50: mol_type = other DNA
aaggttgctgcggatgcggcgaaagcttcaaccgctgtacctgcatcata

SEQ ID NO: 54738 - DNA, 50 bp, synthetic construct
  source 1..50: mol_type = other DNA
cttattttcttgattctctcgctcatgaagaaaagaatcttttaaagaag

SEQ ID NO: 54739 - DNA, 50 bp, synthetic construct
  source 1..50: mol_type = other DNA
atttgttaaaaatattttagaaagcggtttccgcataatttttctcttgt

SEQ ID NO: 54740 - DNA, 50 bp, synthetic construct
  source 1..50: mol_type = other DNA
gtttggtcttagttcaagaggtgatgaaacatattccgacccattcaaac

SEQ ID NO: 54741 - DNA, 50 bp, synthetic construct
  source 1..50: mol_type = other DNA
ctgttcccgattcccaaatgctgatccgggcagttgaaaaagtacaaggt

SEQ ID NO: 54742 - DNA, 50 bp, synthetic construct
  source 1..50: mol_type = other DNA
tatgcggtagcgcatgccaagattgcaattttgattatatcaccagcagg

SEQ ID NO: 54743 - DNA, 50 bp, synthetic construct
  source 1..50: mol_type = other DNA
ctgccccagctgggctacaccgccatgtgggtggtgatggataatggcaa

SEQ ID NO: 54744 - DNA, 50 bp, synthetic construct
  source 1..50: mol_type = other DNA
catgcagcgcatggtgatgaaacagaaagccgccctctccgggcggcttc

SEQ ID NO: 54745 - DNA, 50 bp, synthetic construct
  source 1..50: mol_type = other DNA
aatgcagacttcctcgaggtagcggatgctccctcaaactcctacgctta

SEQ ID NO: 54746 - DNA, 50 bp, synthetic construct
  source 1..50: mol_type = other DNA
ataatatgataccaaccatttttggccaccaatcgatgtagtcgtattgg

SEQ ID NO: 54747 - DNA, 50 bp, synthetic construct
  source 1..50: mol_type = other DNA
caccggctgttccttctaacattacgctgactcagataccgcagcgatgc

SEQ ID NO: 54748 - DNA, 50 bp, synthetic construct
  source 1..50: mol_type = other DNA
acttcttattgacaattctctaatcatgaggaaatccgtgggacagaaaa

SEQ ID NO: 54749 - DNA, 50 bp, synthetic construct
  source 1..50: mol_type = other DNA
ttattccgccgaccatcaatccgctgacggacaccatttcctgcgaagtg

SEQ ID NO: 54750 - DNA, 50 bp, synthetic construct
  source 1..50: mol_type = other DNA
ataaaccgccaaccgacagccccgagcgaaatggggcgttcgccgctaaa

SEQ ID NO: 54751 - DNA, 50 bp, synthetic construct
  source 1..50: mol_type = other DNA
ttgcctcaaacattacagtaataagcataattttgcattgcttttggaaa

SEQ ID NO: 54752 - DNA, 50 bp, synthetic construct
  source 1..50: mol_type = other DNA
ggcataaattgcagttctgtataccttctttcagtacataattttctggc

SEQ ID NO: 54753 - DNA, 50 bp, synthetic construct
  source 1..50: mol_type = other DNA
ttatgagattttttgccggattttacataattttctggcaaatctcaatg

SEQ ID NO: 54754 - DNA, 50 bp, synthetic construct
  source 1..50: mol_type = other DNA
cggtacaaaaacggcgggtcgcaggactgtttcacgcttggactgtccac

SEQ ID NO: 54755 - DNA, 50 bp, synthetic construct
  source 1..50: mol_type = other DNA
gtatggcggttatgttcactggagacctgaaatgaaagaaaaggcacgac

SEQ ID NO: 54756 - DNA, 50 bp, synthetic construct
  source 1..50: mol_type = other DNA
tgttcaaaggtgttcggatgaggttaaccctgttagaacaccatataaga

SEQ ID NO: 54757 - DNA, 50 bp, synthetic construct
  source 1..50: mol_type = other DNA
caagtaaacttatctgcggaaattgcaatcaagcgcgacaaaccgacgca

SEQ ID NO: 54758 - DNA, 50 bp, synthetic construct
  source 1..50: mol_type = other DNA
cgttatttactgtcaaataagttgtacaagaaaaatcaaattaaaggagt

SEQ ID NO: 54759 - DNA, 50 bp, synthetic construct
  source 1..50: mol_type = other DNA
ggaaggacggtatccacaaatggagtttaatcagtgaatcggagtctttc

SEQ ID NO: 54760 - DNA, 50 bp, synthetic construct
  source 1..50: mol_type = other DNA
aatacgagggctatttctaaaagaattactttaaaattgtctaacatact

SEQ ID NO: 54761 - DNA, 50 bp, synthetic construct
  source 1..50: mol_type = other DNA
tgcacaagcgttgccttcaatcgttcttgataggaattacatcttctgta

SEQ ID NO: 54762 - DNA, 50 bp, synthetic construct
  source 1..50: mol_type = other DNA
ataattgtagctgttattatctggaacttgataaatacagcttttagagt

SEQ ID NO: 54763 - DNA, 50 bp, synthetic construct
  source 1..50: mol_type = other DNA
aatttgaggaaatcgttttcttagcttatagaaagcgaggttatttgatg

SEQ ID NO: 54764 - DNA, 50 bp, synthetic construct
  source 1..50: mol_type = other DNA
tacattttttcgtggaaatcgtaaaaaaccgattttacatctacgatttt

SEQ ID NO: 54765 - DNA, 50 bp, synthetic construct
  source 1..50: mol_type = other DNA
ccaattgcaaattcatcggtataaaataattacaatgaatcatcaataaa

SEQ ID NO: 54766 - DNA, 50 bp, synthetic construct
  source 1..50: mol_type = other DNA
taccacaagtttatgtttacatccatcaatcatagtatcccattgaggaa

SEQ ID NO: 54767 - DNA, 50 bp, synthetic construct
  source 1..50: mol_type = other DNA
cactactattataccataggtgctatttcatttatataataactccagtt

SEQ ID NO: 54768 - DNA, 50 bp, synthetic construct
  source 1..50: mol_type = other DNA
cataatcacagccctcctcattttttatcctgaggctggaggtatttatg

SEQ ID NO: 54769 - DNA, 50 bp, synthetic construct
  source 1..50: mol_type = other DNA
ggataaaaattaaaatctgaacttttattatccaggattaatgtttatat

SEQ ID NO: 54770 - DNA, 50 bp, synthetic construct
  source 1..50: mol_type = other DNA
gctccatttgttttctcagcgggaagttggtctttcaacgccgggatgat

SEQ ID NO: 54771 - DNA, 50 bp, synthetic construct
  source 1..50: mol_type = other DNA
gaaaagtgggaatcaaaaaatctatgaaatagtgaggtttagagcttaat

SEQ ID NO: 54772 - DNA, 50 bp, synthetic construct
  source 1..50: mol_type = other DNA
tcctcatcatccaagccaaataagtctatggatggcatgacctctgccga

SEQ ID NO: 54773 - DNA, 50 bp, synthetic construct
  source 1..50: mol_type = other DNA
tctctgaaattccaaagacagcataggtatggcttgtggaaattcagatc

SEQ ID NO: 54774 - DNA, 50 bp, synthetic construct
  source 1..50: mol_type = other DNA
gcaagcagggctaacagtttatcttcagactgccttccggttctgcttct

SEQ ID NO: 54775 - DNA, 50 bp, synthetic construct
  source 1..50: mol_type = other DNA
gatataactgtttattttattataccaataatagatcgagattttgtttt

SEQ ID NO: 54776 - DNA, 50 bp, synthetic construct
  source 1..50: mol_type = other DNA
ttttcaagactgatccagtcttagagctcataaccgctccgtcgcttgga

SEQ ID NO: 54777 - DNA, 50 bp, synthetic construct
  source 1..50: mol_type = other DNA
tgatatctacgtgaaagatatggaagagaatattgatcacgtagtggcca

SEQ ID NO: 54778 - DNA, 50 bp, synthetic construct
  source 1..50: mol_type = other DNA
aagagtggtacgcactatgccgcagacgcggcatgtatacggaagcgctg

SEQ ID NO: 54779 - DNA, 50 bp, synthetic construct
  source 1..50: mol_type = other DNA
aagattgcaaggctgcaacaattcggaaacacggccagcctgcaaagccg

SEQ ID NO: 54780 - DNA, 50 bp, synthetic construct
  source 1..50: mol_type = other DNA
gtaaagcagtaattaaacttaacggccgtgttttttcatgacggcggcaa

SEQ ID NO: 54781 - DNA, 50 bp, synthetic construct
  source 1..50: mol_type = other DNA
attatttctacctagatagagctatgggggcttatcttttctactctatt

SEQ ID NO: 54782 - DNA, 50 bp, synthetic construct
  source 1..50: mol_type = other DNA
atacctcctcaaccacagttttttgcaactaatcatgcttggtttgggaa

SEQ ID NO: 54783 - DNA, 50 bp, synthetic construct
  source 1..50: mol_type = other DNA
gaaggcgtccgcttcctgcttacctccgtaagcatagaaaagacggtggt

SEQ ID NO: 54784 - DNA, 50 bp, synthetic construct
  source 1..50: mol_type = other DNA
ccataaaatgttcttggcggcgtatacctgccgaggaggtgatattatgg

SEQ ID NO: 54785 - DNA, 50 bp, synthetic construct
  source 1..50: mol_type = other DNA
cctgccgcaccaaccatttcacggagccgcgattacgtttgggctgaccg

SEQ ID NO: 54786 - DNA, 50 bp, synthetic construct
  source 1..50: mol_type = other DNA
cgaaataatacgcaaaaatcagggtccttatgcttgctgcaggaatgtcg

SEQ ID NO: 54787 - DNA, 50 bp, synthetic construct
  source 1..50: mol_type = other DNA
gagagcccttattttatcatggacatgaccaaagctgggaaaacgctcac

SEQ ID NO: 54788 - DNA, 50 bp, synthetic construct
  source 1..50: mol_type = other DNA
tgtggatgaatgggcgtcccagggcaaaaatgactaccgtttcacacaaa

SEQ ID NO: 54789 - DNA, 50 bp, synthetic construct
  source 1..50: mol_type = other DNA
tcggcgggactgatgctggtgattttggaatggagcgtctttgaagccgg

SEQ ID NO: 54790 - DNA, 50 bp, synthetic construct
  source 1..50: mol_type = other DNA
gtacgccgtatatttaatgaccgtatattattataacatcgtgtccggct

SEQ ID NO: 54791 - DNA, 50 bp, synthetic construct
  source 1..50: mol_type = other DNA
cagaagtcgtagaagccatggataagcacatatccgttattttcaaaaac

SEQ ID NO: 54792 - DNA, 50 bp, synthetic construct
  source 1..50: mol_type = other DNA
aaagagatcgagattcataacataagtatgtccaagtattgtatgtatct

SEQ ID NO: 54793 - DNA, 50 bp, synthetic construct
  source 1..50: mol_type = other DNA
ccggtctacgacgggctgcatgagcctactgtcagccggagacccaccga

SEQ ID NO: 54794 - DNA, 50 bp, synthetic construct
  source 1..50: mol_type = other DNA
ggacccctccgaccggcactatgaccgcatggttccggaggacgcggtcc

SEQ ID NO: 54795 - DNA, 50 bp, synthetic construct
  source 1..50: mol_type = other DNA
gaaacttccatgagtaacggtttcctccctaagttcctgctttctctttc

SEQ ID NO: 54796 - DNA, 50 bp, synthetic construct
  source 1..50: mol_type = other DNA
ttgcgggcttttttagcctcaaaatttcgcagacctaaagaagcaagcat

SEQ ID NO: 54797 - DNA, 50 bp, synthetic construct
  source 1..50: mol_type = other DNA
tcctactttaaccacaacaggaaaacttccctgttgtaatttttggttga

SEQ ID NO: 54798 - DNA, 50 bp, synthetic construct
  source 1..50: mol_type = other DNA
acccggtaaaaggatactctcctccggaacagcatataggtaaaccaaaa

SEQ ID NO: 54799 - DNA, 50 bp, synthetic construct
  source 1..50: mol_type = other DNA
aacacctctgactggtcttgcagcggcctatatcatcattatctgccata

SEQ ID NO: 54800 - DNA, 50 bp, synthetic construct
  source 1..50: mol_type = other DNA
catcacttttttataatgcatgggcttggacgcataacaaaaaagtgagg

SEQ ID NO: 54801 - DNA, 50 bp, synthetic construct
  source 1..50: mol_type = other DNA
tacggcgacaccgctgggcagcacaaattctgctgttcggttactccgta

SEQ ID NO: 54802 - DNA, 50 bp, synthetic construct
  source 1..50: mol_type = other DNA
ctcccggcctgcccgacggatgcgatcgcatctatgaaggatgcttggac

SEQ ID NO: 54803 - DNA, 50 bp, synthetic construct
  source 1..50: mol_type = other DNA
tggttatcaaaaacgatactctgcggaatctgtctgtcggagaataatca

SEQ ID NO: 54804 - DNA, 50 bp, synthetic construct
  source 1..50: mol_type = other DNA
tgacctccaaacaaaaaaaggcccgcgggctatgccttttcggatggctc

SEQ ID NO: 54805 - DNA, 50 bp, synthetic construct
  source 1..50: mol_type = other DNA
ctcaaaaatgggtacaaaaataacactatagacgtgcaacaggttttgaa

SEQ ID NO: 54806 - DNA, 50 bp, synthetic construct
  source 1..50: mol_type = other DNA
cgctgccgtatccggtcagggctgtgcagccatgaccgccgtaatctacg

SEQ ID NO: 54807 - DNA, 50 bp, synthetic construct
  source 1..50: mol_type = other DNA
aaaaagaaagccgattgatttttccggaaagaacagatttgaattttttg

SEQ ID NO: 54808 - DNA, 50 bp, synthetic construct
  source 1..50: mol_type = other DNA
tgcaaaattatttaaaaattcctgctgaaaaataattgaataatgggata

SEQ ID NO: 54809 - DNA, 50 bp, synthetic construct
  source 1..50: mol_type = other DNA
ctgcatctgctgctgccggtcgtgacgcggactggataaagcaaaaaaca

SEQ ID NO: 54810 - DNA, 50 bp, synthetic construct
  source 1..50: mol_type = other DNA
atttggttataagatagaaaacggtactgttatcaataatatcagccacc

SEQ ID NO: 54811 - DNA, 50 bp, synthetic construct
  source 1..50: mol_type = other DNA
ctttgttattcaaagttaaaagggcagccttttcaccttttgaaataaaa

SEQ ID NO: 54812 - DNA, 50 bp, synthetic construct
  source 1..50: mol_type = other DNA
catgattcagaaattcgtcaaagcggaagctgtaaactctacgaataaat

SEQ ID NO: 54813 - DNA, 50 bp, synthetic construct
  source 1..50: mol_type = other DNA
attacaggaaacataaactatacgctgtttccctttcagttcatccatcc

SEQ ID NO: 54814 - DNA, 50 bp, synthetic construct
  source 1..50: mol_type = other DNA
tatttccaaaagaaacgggattattctttatcccaattcttttggaaatg

SEQ ID NO: 54815 - DNA, 50 bp, synthetic construct
  source 1..50: mol_type = other DNA
cagcaggcgtgttttcttatcctatgatagttgagggtgctttcctgctg

SEQ ID NO: 54816 - DNA, 50 bp, synthetic construct
  source 1..50: mol_type = other DNA
tgtacataattaaaacctccatatgcctatttttgtcaaataaaatcaca

SEQ ID NO: 54817 - DNA, 50 bp, synthetic construct
  source 1..50: mol_type = other DNA
atagctgatatgcagtaatatacaattgttggaagtttcttatctttgcg

SEQ ID NO: 54818 - DNA, 50 bp, synthetic construct
  source 1..50: mol_type = other DNA
agagtataaaaaataaacccttgcggagcatcccgtattttttatgagaa

SEQ ID NO: 54819 - DNA, 50 bp, synthetic construct
  source 1..50: mol_type = other DNA
gctgcacgcctgtctgccacaggaaaatgaccggctggcaggcgcacagc

SEQ ID NO: 54820 - DNA, 50 bp, synthetic construct
  source 1..50: mol_type = other DNA
tcactcaattttctgcgcaaagtctctgttcgataagaaaaaggaagtga

SEQ ID NO: 54821 - DNA, 50 bp, synthetic construct
  source 1..50: mol_type = other DNA
gtgaaaatgtatgtaaaaaagggtattcagttttttcagtttgttttcca

SEQ ID NO: 54822 - DNA, 50 bp, synthetic construct
  source 1..50: mol_type = other DNA
ggctatcgtattgagaacggaaaagctttttcggggacaatgttcaggcg

SEQ ID NO: 54823 - DNA, 50 bp, synthetic construct
  source 1..50: mol_type = other DNA
tatataaagacaagtaattggttctaccaccaatttggtggtattatata

SEQ ID NO: 54824 - DNA, 50 bp, synthetic construct
  source 1..50: mol_type = other DNA
agctgttgcggaacgtgctttcgcttggcaaaatacgttccgaaagataa

SEQ ID NO: 54825 - DNA, 50 bp, synthetic construct
  source 1..50: mol_type = other DNA
cctctggacgctgcgtcacggcacacttttcgggaggcagcggacagaga

SEQ ID NO: 54826 - DNA, 50 bp, synthetic construct
  source 1..50: mol_type = other DNA
ccagccattttcgttgaaagcgtcaagagtgtttccgtgaagatcgccgg

SEQ ID NO: 54827 - DNA, 50 bp, synthetic construct
  source 1..50: mol_type = other DNA
cactatcacaccaagggcgcaatagcctgctacaacattttgtggtatga

SEQ ID NO: 54828 - DNA, 50 bp, synthetic construct
  source 1..50: mol_type = other DNA
tattatgttatcatttaagcgcatacggacgatataccgaaaaggttaca

SEQ ID NO: 54829 - DNA, 50 bp, synthetic construct
  source 1..50: mol_type = other DNA
gtattccatgtcatgctttttgataaatcaatcggctttcttttttatac

SEQ ID NO: 54830 - DNA, 50 bp, synthetic construct
  source 1..50: mol_type = other DNA
ttaagtagttatattattgatagctggttatcagtaattatactaactaa

SEQ ID NO: 54831 - DNA, 50 bp, synthetic construct
  source 1..50: mol_type = other DNA
gatacaggtacagagacagtgcgcgccggcggcctcgatctggttgttgt

SEQ ID NO: 54832 - DNA, 50 bp, synthetic construct
  source 1..50: mol_type = other DNA
tatattaaaagtaatgataccaatgaattgactggatatatttcaaaatc

SEQ ID NO: 54833 - DNA, 50 bp, synthetic construct
  source 1..50: mol_type = other DNA
gattttttccactcaaagtgtattggaaagaccgttcacgctccgaaagt

SEQ ID NO: 54834 - DNA, 50 bp, synthetic construct
  source 1..50: mol_type = other DNA
tttatgggtaaaatcatagtcacacttttcgctatgactttttttatata

SEQ ID NO: 54835 - DNA, 50 bp, synthetic construct
  source 1..50: mol_type = other DNA
cattgtagcggatgctgcgtgacgatcgtgacgaacagggcgctgatctg

SEQ ID NO: 54836 - DNA, 50 bp, synthetic construct
  source 1..50: mol_type = other DNA
attcaagcgcgctaccaaaactgcgctctggttttccttcacgccggaac

SEQ ID NO: 54837 - DNA, 50 bp, synthetic construct
  source 1..50: mol_type = other DNA
cagcaggaaagcactctcaactatcataggataagaaaacacgcctgctg

SEQ ID NO: 54838 - DNA, 50 bp, synthetic construct
  source 1..50: mol_type = other DNA
tgttttctgcggtgcttttattataaataaagaaagcagggtgttaattc

SEQ ID NO: 54839 - DNA, 50 bp, synthetic construct
  source 1..50: mol_type = other DNA
agagtataaaaaataaacccttgcggaacgcaggatatttttctggaaag

SEQ ID NO: 54840 - DNA, 50 bp, synthetic construct
  source 1..50: mol_type = other DNA
agaaaagcatttgaatccatatcgtctttaatggatatgtaatctttgcc

SEQ ID NO: 54841 - DNA, 50 bp, synthetic construct
  source 1..50: mol_type = other DNA
cgagaggagcgggacaaggaggaacgttcctgcttttccttatccttacg

SEQ ID NO: 54842 - DNA, 50 bp, synthetic construct
  source 1..50: mol_type = other DNA
gtataaactattcggaaacctcgtcatagagctttccgaggaaacactgg

SEQ ID NO: 54843 - DNA, 50 bp, synthetic construct
  source 1..50: mol_type = other DNA
acattggtaaactctgtatatgtgtaaatgaatggagaaagaccctatga

SEQ ID NO: 54844 - DNA, 50 bp, synthetic construct
  source 1..50: mol_type = other DNA
aaatacccttaaatatagtatttccagaaatactattttttaataaatta

SEQ ID NO: 54845 - DNA, 50 bp, synthetic construct
  source 1..50: mol_type = other DNA
atgtataaggatgaattaaattgaaaatataataagatattgttatttat

SEQ ID NO: 54846 - DNA, 50 bp, synthetic construct
  source 1..50: mol_type = other DNA
ttctaattatcaggtggcgttgcagcgcaaagattacaaaataattacag

SEQ ID NO: 54847 - DNA, 50 bp, synthetic construct
  source 1..50: mol_type = other DNA
ttaatgtgttgcttgccttatcgtaggcgagttctccggcaagacagcaa

SEQ ID NO: 54848 - DNA, 50 bp, synthetic construct
  source 1..50: mol_type = other DNA
gccagaacttgaagatgcttttcccgtgaaaaggtcatgcagattttggc

SEQ ID NO: 54849 - DNA, 50 bp, synthetic construct
  source 1..50: mol_type = other DNA
actatggctatcgttgtagtgccaaaaccgtgaaaaagaagttccatcta

SEQ ID NO: 54850 - DNA, 50 bp, synthetic construct
  source 1..50: mol_type = other DNA
ccagctcctggagccgcgagagctcgtcgccggagaccgccaggggctgg

SEQ ID NO: 54851 - DNA, 50 bp, synthetic construct
  source 1..50: mol_type = other DNA
attgtaaaaattatattaagataaatattatttacataatcatttaattt

SEQ ID NO: 54852 - DNA, 50 bp, synthetic construct
  source 1..50: mol_type = other DNA
ctttgcaaagacttccgcctgaaaaaaatacgttggttcgagtccagcac

SEQ ID NO: 54853 - DNA, 50 bp, synthetic construct
  source 1..50: mol_type = other DNA
acttttgaaggaggatgctctatgaacaaaaagaaggaggagtcataatg

SEQ ID NO: 54854 - DNA, 50 bp, synthetic construct
  source 1..50: mol_type = other DNA
acaccccacacgtcgctcataattgcttttggttgagacgtatgcaaggt

SEQ ID NO: 54855 - DNA, 50 bp, synthetic construct
  source 1..50: mol_type = other DNA
atttctgtatcttgtatttttggatatacaaaaagccttcatttttcaag

SEQ ID NO: 54856 - DNA, 50 bp, synthetic construct
  source 1..50: mol_type = other DNA
ataataaaaaacctccattttcttatcaaaagatggaattattatagtag

SEQ ID NO: 54857 - DNA, 50 bp, synthetic construct
  source 1..50: mol_type = other DNA
gtcactccatacaagggtatggtttcctgaacccggggatgcggacggtg

SEQ ID NO: 54858 - DNA, 50 bp, synthetic construct
  source 1..50: mol_type = other DNA
tttacaaaacggaactgtgccagaattcaggcggagcggctttatgaaat

SEQ ID NO: 54859 - DNA, 50 bp, synthetic construct
  source 1..50: mol_type = other DNA
tcgcttattccagaagaaaaggtgataacggtttctacgggaatatgtca

SEQ ID NO: 54860 - DNA, 50 bp, synthetic construct
  source 1..50: mol_type = other DNA
tttgttttggcgtatgccataaatatcttcatgaacaaccccaaaaaggc

SEQ ID NO: 54861 - DNA, 50 bp, synthetic construct
  source 1..50: mol_type = other DNA
ttataaatcaatttcttttttcttttcaataaaaagaaaagaggttataa

SEQ ID NO: 54862 - DNA, 50 bp, synthetic construct
  source 1..50: mol_type = other DNA
tgatgaattaattgaagaaattaaaaggaaataataaaatgtcttcattc

SEQ ID NO: 54863 - DNA, 50 bp, synthetic construct
  source 1..50: mol_type = other DNA
gtggaaccatgagacacattccgtatgatgatgattcacaatccgatgac

SEQ ID NO: 54864 - DNA, 50 bp, synthetic construct
  source 1..50: mol_type = other DNA
acgatcaagattatcacaaattatgcatacagtttgattgagagcgaggt

SEQ ID NO: 54865 - DNA, 50 bp, synthetic construct
  source 1..50: mol_type = other DNA
acactccctgtaaaagctgtgttagtcatgtttggatatacacccggtgc

SEQ ID NO: 54866 - DNA, 50 bp, synthetic construct
  source 1..50: mol_type = other DNA
ttctttttcctttaaatccgaatcaagataggtgtttaaaaatgaaagca

SEQ ID NO: 54867 - DNA, 50 bp, synthetic construct
  source 1..50: mol_type = other DNA
cgcgtttaatgcttccggcattactggcgctggttgaagctgtaaacgcc

SEQ ID NO: 54868 - DNA, 50 bp, synthetic construct
  source 1..50: mol_type = other DNA
actaagctagctagaaatagttagtttgatatatttcttcatcaatttgt

SEQ ID NO: 54869 - DNA, 50 bp, synthetic construct
  source 1..50: mol_type = other DNA
agaccttattatcggtagcgatgtgacatcattttttgtatataaaagta

SEQ ID NO: 54870 - DNA, 50 bp, synthetic construct
  source 1..50: mol_type = other DNA
cgcactcggactcatgatcggaggaatctggaatcaggaacagaaattac

SEQ ID NO: 54871 - DNA, 50 bp, synthetic construct
  source 1..50: mol_type = other DNA
tggtccgttcaacgaaaatgattatattgcctttttcgtttttagtcaat

SEQ ID NO: 54872 - DNA, 50 bp, synthetic construct
  source 1..50: mol_type = other DNA
tctcggtttgaaaaaagagaattccttaactgcatttattataacggagt

SEQ ID NO: 54873 - DNA, 50 bp, synthetic construct
  source 1..50: mol_type = other DNA
ttagtcttaagtttattgattttcggaaaagccctgaacccgttgaggct

SEQ ID NO: 54874 - DNA, 50 bp, synthetic construct
  source 1..50: mol_type = other DNA
atcattaccagtttgggggtgctcacctgcgccctcaaactggtaattaa

SEQ ID NO: 54875 - DNA, 50 bp, synthetic construct
  source 1..50: mol_type = other DNA
gttaatgatatagaaagaaaaaaacagctttggttttgacgagcattacc

SEQ ID NO: 54876 - DNA, 50 bp, synthetic construct
  source 1..50: mol_type = other DNA
gtatttttcgaaataagccagtgcatacaatgtcttattttatctatgcc

SEQ ID NO: 54877 - DNA, 50 bp, synthetic construct
  source 1..50: mol_type = other DNA
aagccgagcgaccgttcaagtcctccgccgcacagagagtagcttctcta

SEQ ID NO: 54878 - DNA, 50 bp, synthetic construct
  source 1..50: mol_type = other DNA
gaatagtaagcaaattatttttcaaagaataaagtgcatttatacacata

SEQ ID NO: 54879 - DNA, 50 bp, synthetic construct
  source 1..50: mol_type = other DNA
cgagaagtctttttatggaggttcaatcagctcttgttgtagaaaggagc

SEQ ID NO: 54880 - DNA, 50 bp, synthetic construct
  source 1..50: mol_type = other DNA
tcatgaagtccgaacagctccatctgctcccagctactcagattacaaaa

SEQ ID NO: 54881 - DNA, 50 bp, synthetic construct
  source 1..50: mol_type = other DNA
atgtgctatactcacatgagattaatcttactcatacacacataaagaga

SEQ ID NO: 54882 - DNA, 50 bp, synthetic construct
  source 1..50: mol_type = other DNA
tgaagcttgcggtagaatattccaaagtaaatatgatatggcaaaaccca

SEQ ID NO: 54883 - DNA, 50 bp, synthetic construct
  source 1..50: mol_type = other DNA
attggaagtatgatctgtagttttgccggacgacgggcttcgattccgcc

SEQ ID NO: 54884 - DNA, 50 bp, synthetic construct
  source 1..50: mol_type = other DNA
aaattttaagcgaggtgtttcaaaatatgatgacacatcaattatttttt

SEQ ID NO: 54885 - DNA, 50 bp, synthetic construct
  source 1..50: mol_type = other DNA
aactcctcttatttaaatatttttatggtgtaacttatttactcttaata

SEQ ID NO: 54886 - DNA, 50 bp, synthetic construct
  source 1..50: mol_type = other DNA
cggagcagttttcctttacgacctgaaattggtagcagatgcacgctgcg

SEQ ID NO: 54887 - DNA, 50 bp, synthetic construct
  source 1..50: mol_type = other DNA
atcaagcctcctttcgaccgtattacaacacggaacggatgatccttgaa

SEQ ID NO: 54888 - DNA, 50 bp, synthetic construct
  source 1..50: mol_type = other DNA
tcaatcaacgtaaaagcacgtaatttttcattttgttttaccttgagagc

SEQ ID NO: 54889 - DNA, 50 bp, synthetic construct
  source 1..50: mol_type = other DNA
tccgactttgtggttctcaggatgatcaagctgtgagcggcaaacgcaaa

SEQ ID NO: 54890 - DNA, 50 bp, synthetic construct
  source 1..50: mol_type = other DNA
atttcgattcttgtttcttcttcgatccgcctccaaatgaaaggagaaat

SEQ ID NO: 54891 - DNA, 50 bp, synthetic construct
  source 1..50: mol_type = other DNA
tagtaaaattctgattatattatatcggaaaaatattgcgaattttgaag

SEQ ID NO: 54892 - DNA, 50 bp, synthetic construct
  source 1..50: mol_type = other DNA
taattcaagatgagtcaataaaatattgtaaatgcactaaaatagcggct

SEQ ID NO: 54893 - DNA, 50 bp, synthetic construct
  source 1..50: mol_type = other DNA
tatatgattgcatctgccttttcttacccaaatttaaatacaataacata

SEQ ID NO: 54894 - DNA, 50 bp, synthetic construct
  source 1..50: mol_type = other DNA
cacatcaaaacggtagataccatcgtctcggtattgacccgcttgatgaa

SEQ ID NO: 54895 - DNA, 50 bp, synthetic construct
  source 1..50: mol_type = other DNA
ccctcgactttctttcttctcatatatttgttacgaaagtgttaataagg

SEQ ID NO: 54896 - DNA, 50 bp, synthetic construct
  source 1..50: mol_type = other DNA
attatggactgacagaccttggaaaaatcggcagtctttctcgccattat

SEQ ID NO: 54897 - DNA, 50 bp, synthetic construct
  source 1..50: mol_type = other DNA
tttgctgtagggctgatttttaaccagataaatgccattagcacagaata

SEQ ID NO: 54898 - DNA, 50 bp, synthetic construct
  source 1..50: mol_type = other DNA
ggaatacgccgaaagcggaacaggtcctccttctgttttcggcatatacc

SEQ ID NO: 54899 - DNA, 50 bp, synthetic construct
  source 1..50: mol_type = other DNA
gcggaatatactacacgaagatatgccgtccttgctgtagataatggcgt

SEQ ID NO: 54900 - DNA, 50 bp, synthetic construct
  source 1..50: mol_type = other DNA
tccgtgcctatatcagtcagcaatccatgattcactgataatgtaacggc

SEQ ID NO: 54901 - DNA, 50 bp, synthetic construct
  source 1..50: mol_type = other DNA
gaatctcttattatgaaagcaataattataccatatcctccaagaaaagt

SEQ ID NO: 54902 - DNA, 50 bp, synthetic construct
  source 1..50: mol_type = other DNA
gtataaaaataaaacctatgcacaaggtgcctattatttttaacaaatag

SEQ ID NO: 54903 - DNA, 50 bp, synthetic construct
  source 1..50: mol_type = other DNA
ttcgcttttcatcgttttttcggttttccggtaaaggtttcaaaaccaaa

SEQ ID NO: 54904 - DNA, 50 bp, synthetic construct
  source 1..50: mol_type = other DNA
tccatactaatatagcaaacatatatttgaattccatactttagaaccat

SEQ ID NO: 54905 - DNA, 50 bp, synthetic construct
  source 1..50: mol_type = other DNA
aatccttgtatccggctgtgacacggctttcattatgcaaaacaatgaca

SEQ ID NO: 54906 - DNA, 50 bp, synthetic construct
  source 1..50: mol_type = other DNA
acggcagcagaatccatctgtgaaaactttatagccgattggcatgtgcc

SEQ ID NO: 54907 - DNA, 50 bp, synthetic construct
  source 1..50: mol_type = other DNA
tctgaatataaatatcttttttgatcgtaaagctcatatttatgatgtac

SEQ ID NO: 54908 - DNA, 50 bp, synthetic construct
  source 1..50: mol_type = other DNA
tttaagtataaaaaataatatcaagcggcattttattttgatcacgtgaa

SEQ ID NO: 54909 - DNA, 50 bp, synthetic construct
  source 1..50: mol_type = other DNA
gagccatccgaaaaggcatagcccgcgggcctttttgtttggaggtcatc

SEQ ID NO: 54910 - DNA, 50 bp, synthetic construct
  source 1..50: mol_type = other DNA
gtctttttcggcaacagagccaccccgtgatatggtctggcgtgaaagcc

SEQ ID NO: 54911 - DNA, 50 bp, synthetic construct
  source 1..50: mol_type = other DNA
gtttgtgtcactggacatttctatccatttttgtgcgacgtcgcacatat

SEQ ID NO: 54912 - DNA, 50 bp, synthetic construct
  source 1..50: mol_type = other DNA
gagctgatatgctataatatttagagctaaatacggagtggctgaagcta

SEQ ID NO: 54913 - DNA, 50 bp, synthetic construct
  source 1..50: mol_type = other DNA
aataataaaaactgcttatacaagtacttgttcgtaatatttttcatttt

SEQ ID NO: 54914 - DNA, 50 bp, synthetic construct
  source 1..50: mol_type = other DNA
gaattacagaaatagtagcaccaacttatgtgctaaaatgtaacagaacg

SEQ ID NO: 54915 - DNA, 50 bp, synthetic construct
  source 1..50: mol_type = other DNA
attcggtacagctcggtgtcctttggaaagtattgcgactgaaaccgaag

SEQ ID NO: 54916 - DNA, 50 bp, synthetic construct
  source 1..50: mol_type = other DNA
tgctattactttctttttcatactgcatatggacatccacaataaaatca

SEQ ID NO: 54917 - DNA, 50 bp, synthetic construct
  source 1..50: mol_type = other DNA
cgttctgttccgtctggcaaggtatatgtcataccagatacaacaatacc

SEQ ID NO: 54918 - DNA, 50 bp, synthetic construct
  source 1..50: mol_type = other DNA
tgctttcaccgtccgcatccccaggtcattttatgcggacggcattgaat

SEQ ID NO: 54919 - DNA, 50 bp, synthetic construct
  source 1..50: mol_type = other DNA
catgacagcaaaaagctactcttatcgtatagtttgtttttggtgccgtg

SEQ ID NO: 54920 - DNA, 50 bp, synthetic construct
  source 1..50: mol_type = other DNA
tctttcaaatcgaggaggacttaaaagcctgatcgcccgcattatatgca

SEQ ID NO: 54921 - DNA, 50 bp, synthetic construct
  source 1..50: mol_type = other DNA
aacacggagtgccgcaggcaggcgctggcttcgctcattgttcctgttcc

SEQ ID NO: 54922 - DNA, 50 bp, synthetic construct
  source 1..50: mol_type = other DNA
ggcgatggctgccgctgcgcgcattccggcgggcagcggcagcgtgcggc

SEQ ID NO: 54923 - DNA, 50 bp, synthetic construct
  source 1..50: mol_type = other DNA
cattattgatggttgggaggtatccaactacagcacaaccgtcaactatt

SEQ ID NO: 54924 - DNA, 50 bp, synthetic construct
  source 1..50: mol_type = other DNA
aatcataaatggcaattatattataaacggcttaattgaaatttattaaa

SEQ ID NO: 54925 - DNA, 50 bp, synthetic construct
  source 1..50: mol_type = other DNA
tttgtcaagctttttctgccaggtttttgactgttgaaagtgtggaaaga

SEQ ID NO: 54926 - DNA, 50 bp, synthetic construct
  source 1..50: mol_type = other DNA
atttaaagataaaaaatattttgatagttaattatttgaagggtggtaat

SEQ ID NO: 54927 - DNA, 50 bp, synthetic construct
  source 1..50: mol_type = other DNA
gattgtagaaatagcaaataaataattatttgtatcaaacttatacgtca

SEQ ID NO: 54928 - DNA, 50 bp, synthetic construct
  source 1..50: mol_type = other DNA
atattatttttctgatttttgctgctagacaaaggggtttaaatcaatat

SEQ ID NO: 54929 - DNA, 50 bp, synthetic construct
  source 1..50: mol_type = other DNA
tccaaatatgcaaaaggttgcattataaagaaatcacttgcatagttctg

SEQ ID NO: 54930 - DNA, 50 bp, synthetic construct
  source 1..50: mol_type = other DNA
ggggagataagacgttttttgagggacctgagatttggtcttaactcccc

SEQ ID NO: 54931 - DNA, 50 bp, synthetic construct
  source 1..50: mol_type = other DNA
gcatggtttcaaggcttgcctttatataaagggatggggagaaatcaaaa

SEQ ID NO: 54932 - DNA, 50 bp, synthetic construct
  source 1..50: mol_type = other DNA
gacttaccacctttatttctgtgctgccaaggaaagaaaggtgaaaggta

SEQ ID NO: 54933 - DNA, 50 bp, synthetic construct
  source 1..50: mol_type = other DNA
cttgctcgggaaggtcattgccgcccacgatctattcgttggagagcaag

SEQ ID NO: 54934 - DNA, 50 bp, synthetic construct
  source 1..50: mol_type = other DNA
gatggtttatctgttttttgcataaaaatcggaaaagacagtaaaagaat

SEQ ID NO: 54935 - DNA, 50 bp, synthetic construct
  source 1..50: mol_type = other DNA
ttagttcattctttatttactgtcaattatggctggaaataaagtagtaa

SEQ ID NO: 54936 - DNA, 50 bp, synthetic construct
  source 1..50: mol_type = other DNA
aaattttgacaaattaactattgtagaaaatatgctataataaaaaacta

SEQ ID NO: 54937 - DNA, 50 bp, synthetic construct
  source 1..50: mol_type = other DNA
ggcattatgcttgctcctttctaatgggtaaaaggtgcaagaaacgacag

SEQ ID NO: 54938 - DNA, 50 bp, synthetic construct
  source 1..50: mol_type = other DNA
gcaaggcagtgatagatgaagctgctcatcttcattttcgttcacctctt

SEQ ID NO: 54939 - DNA, 50 bp, synthetic construct
  source 1..50: mol_type = other DNA
aatatcaaactaaaacatctatgatttcttccttatttaaatgcagtatt

SEQ ID NO: 54940 - DNA, 50 bp, synthetic construct
  source 1..50: mol_type = other DNA
gagccgacaaaactatgacggccgtcttctccggtcggttttgtcgttat

SEQ ID NO: 54941 - DNA, 50 bp, synthetic construct
  source 1..50: mol_type = other DNA
gggatatctttcccggaatctatcaacataaaagccgggagcgatttccc

SEQ ID NO: 54942 - DNA, 50 bp, synthetic construct
  source 1..50: mol_type = other DNA
aatatctgcaccagcaatgtgaattaatatttaaatacggaggatatatg

SEQ ID NO: 54943 - DNA, 50 bp, synthetic construct
  source 1..50: mol_type = other DNA
aaaacctccaatgtttacaaatagaaaataatacaaacaggctaggataa

SEQ ID NO: 54944 - DNA, 50 bp, synthetic construct
  source 1..50: mol_type = other DNA
gaaattttgataaagtatatagggaacccaccatatacccaaaaactccc

SEQ ID NO: 54945 - DNA, 50 bp, synthetic construct
  source 1..50: mol_type = other DNA
aacagataaaaagaattatcgctaaaaaggagctgattttttttatgctt

SEQ ID NO: 54946 - DNA, 50 bp, synthetic construct
  source 1..50: mol_type = other DNA
cagacggtttccctcgtccaccacatatggcacgaaagagaactaatcta

SEQ ID NO: 54947 - DNA, 50 bp, synthetic construct
  source 1..50: mol_type = other DNA
catattcaagcgcctgagagtataataccttcctgttttcgttcaattta

SEQ ID NO: 54948 - DNA, 50 bp, synthetic construct
  source 1..50: mol_type = other DNA
gacggataagaatctgcttgtaatcaattacagcagcgaggatatccgtc

SEQ ID NO: 54949 - DNA, 50 bp, synthetic construct
  source 1..50: mol_type = other DNA
ataccctcattttttatgggtaaaataatttccaatctggatgagtacat

SEQ ID NO: 54950 - DNA, 50 bp, synthetic construct
  source 1..50: mol_type = other DNA
cggctacagcattgaaaacggctgcggtgccggagaccttgcacaggcaa

SEQ ID NO: 54951 - DNA, 50 bp, synthetic construct
  source 1..50: mol_type = other DNA
tttgatgtcaggatatgcttttcatatcaaccacatcacccaacactcgc

SEQ ID NO: 54952 - DNA, 50 bp, synthetic construct
  source 1..50: mol_type = other DNA
ctccgaaagagcgtttaaaaaggtcgtattttttatacacttttttggag

SEQ ID NO: 54953 - DNA, 50 bp, synthetic construct
  source 1..50: mol_type = other DNA
tttgcttttggaaaatgtttcttaatcaagaaaataaggagcgaaaagaa

SEQ ID NO: 54954 - DNA, 50 bp, synthetic construct
  source 1..50: mol_type = other DNA
cgcaacacattccattgtttaacctctcataaagcttgatatgctttgcg

SEQ ID NO: 54955 - DNA, 50 bp, synthetic construct
  source 1..50: mol_type = other DNA
tttattagattttacaccattttttaaaaatagggcaaaaactggtcatt

SEQ ID NO: 54956 - DNA, 50 bp, synthetic construct
  source 1..50: mol_type = other DNA
cgcgccgacgctgttcagcggcgattcgcaagatgaacagcgaggtgaac

SEQ ID NO: 54957 - DNA, 50 bp, synthetic construct
  source 1..50: mol_type = other DNA
ccattttgcttttaggcgttctccaaagcgccatgggcgacgccaaatct

SEQ ID NO: 54958 - DNA, 50 bp, synthetic construct
  source 1..50: mol_type = other DNA
agtatatagggacatatacatataaggcaatgaatgttgttctatatatg

SEQ ID NO: 54959 - DNA, 50 bp, synthetic construct
  source 1..50: mol_type = other DNA
ccaacgaatccttagccgcatacgagaaaggaggaaaaagccgatggcgg

SEQ ID NO: 54960 - DNA, 50 bp, synthetic construct
  source 1..50: mol_type = other DNA
ccttgcatacacatcatattttgtgaaagaaaggtgaaaggtattcaaga

SEQ ID NO: 54961 - DNA, 50 bp, synthetic construct
  source 1..50: mol_type = other DNA
atctcatcatcattttcttcttctgagccggaagaaaagccggagaaagg

SEQ ID NO: 54962 - DNA, 50 bp, synthetic construct
  source 1..50: mol_type = other DNA
ctgattttaaaactcagtttttcctttttgaatggagttgataaaatgcg

SEQ ID NO: 54963 - DNA, 50 bp, synthetic construct
  source 1..50: mol_type = other DNA
tttctggatagatttgtgccgagaatttgccccttgtacaatgaaagaac

SEQ ID NO: 54964 - DNA, 50 bp, synthetic construct
  source 1..50: mol_type = other DNA
ggagtcgaagtttatcccccccttgcaagtgcgcaatagtccgcgatccc

SEQ ID NO: 54965 - DNA, 50 bp, synthetic construct
  source 1..50: mol_type = other DNA
cgccgttttgatgccgattttgctgtcactaaatccgcaggggttttatt

SEQ ID NO: 54966 - DNA, 50 bp, synthetic construct
  source 1..50: mol_type = other DNA
gatatttatctgatagtgaactattgatagattgctaagagcagctaaag

SEQ ID NO: 54967 - DNA, 50 bp, synthetic construct
  source 1..50: mol_type = other DNA
ttactactttatttccagccataattgacagtaaataaagaatgaactaa

SEQ ID NO: 54968 - DNA, 50 bp, synthetic construct
  source 1..50: mol_type = other DNA
tctcaaatctcaattatcagaagctaatattaaatgtaacagatatgaga

SEQ ID NO: 54969 - DNA, 50 bp, synthetic construct
  source 1..50: mol_type = other DNA
tgtacttcgcatgaagtacggtgcttttctttgttcacatcggtgacttt

SEQ ID NO: 54970 - DNA, 50 bp, synthetic construct
  source 1..50: mol_type = other DNA
tttgtgatttttatactactaacttaatttagtggtataaaattctttgt

SEQ ID NO: 54971 - DNA, 50 bp, synthetic construct
  source 1..50: mol_type = other DNA
cacttaaacatctcactaaaagaaatttttttcttctattataatatgtg

SEQ ID NO: 54972 - DNA, 50 bp, synthetic construct
  source 1..50: mol_type = other DNA
tatcggtaaataatgtagacaaagattttattctgcattatcacaatata

SEQ ID NO: 54973 - DNA, 50 bp, synthetic construct
  source 1..50: mol_type = other DNA
gtgagtcccaagaaaaatgaaaagacctgttccgctttcggtgcattccg

SEQ ID NO: 54974 - DNA, 50 bp, synthetic construct
  source 1..50: mol_type = other DNA
tgctgcgtatctgcaatccaagggaggtcttttttatgattatcgcagct

SEQ ID NO: 54975 - DNA, 50 bp, synthetic construct
  source 1..50: mol_type = other DNA
aggatgctgtcgaaaagcagataccggctttttcttgttcctacgttttg

SEQ ID NO: 54976 - DNA, 50 bp, synthetic construct
  source 1..50: mol_type = other DNA
ttttacttctggtataataatattttaatgatattaatacaaaaataaaa

SEQ ID NO: 54977 - DNA, 50 bp, synthetic construct
  source 1..50: mol_type = other DNA
aacctcatcatcattcagaccgaatagcgggggtgagtgttgcagcagtt

SEQ ID NO: 54978 - DNA, 50 bp, synthetic construct
  source 1..50: mol_type = other DNA
cctctcctttcgtcagattttccttcattctaatctgcgctggtaccggg

SEQ ID NO: 54979 - DNA, 50 bp, synthetic construct
  source 1..50: mol_type = other DNA
caaccttacaactatattataccatcaagacgattcaagttgtgggcaaa

SEQ ID NO: 54980 - DNA, 50 bp, synthetic construct
  source 1..50: mol_type = other DNA
tgttttcttggataccctttcacctttctgaaaaatcatcctgagaaaca

SEQ ID NO: 54981 - DNA, 50 bp, synthetic construct
  source 1..50: mol_type = other DNA
aagtctcttttcataattccacatatatggctgattttgaacatgtaatt

SEQ ID NO: 54982 - DNA, 50 bp, synthetic construct
  source 1..50: mol_type = other DNA
gtcgttttcggcatggcgttccctccagacaacgtgtgaccgaacacggc

SEQ ID NO: 54983 - DNA, 50 bp, synthetic construct
  source 1..50: mol_type = other DNA
tcgattttgcttacttttcgcatgaaaatgccaacaatatcaaaaaaaga

SEQ ID NO: 54984 - DNA, 50 bp, synthetic construct
  source 1..50: mol_type = other DNA
cactcatagatacggagaaatattatcataaaggagggtatacaggatga

SEQ ID NO: 54985 - DNA, 50 bp, synthetic construct
  source 1..50: mol_type = other DNA
gcctgcagctgacagatacctgtcaacattcgttcctgctggctgttatt

SEQ ID NO: 54986 - DNA, 50 bp, synthetic construct
  source 1..50: mol_type = other DNA
ttggaataaaacacacaatgcaaaagccaactttgggtacattatttgcc

SEQ ID NO: 54987 - DNA, 50 bp, synthetic construct
  source 1..50: mol_type = other DNA
cttcttcagattttttttgaaccagtgagagcatgaaaaatctcaggaag

SEQ ID NO: 54988 - DNA, 50 bp, synthetic construct
  source 1..50: mol_type = other DNA
cctcaatggatttaccggatttaccggtatatccggcaccaacaccaaaa

SEQ ID NO: 54989 - DNA, 50 bp, synthetic construct
  source 1..50: mol_type = other DNA
ttttccatatcggttcataattcatagaccatatgaattttaagcgaaaa

SEQ ID NO: 54990 - DNA, 50 bp, synthetic construct
  source 1..50: mol_type = other DNA
cggtcatggcggacacctctcattccactggtctcacacctccatcacgg

SEQ ID NO: 54991 - DNA, 50 bp, synthetic construct
  source 1..50: mol_type = other DNA
ctgcggcacccggcatggccgtggccttgcggccctccctgtgaagaaat

SEQ ID NO: 54992 - DNA, 50 bp, synthetic construct
  source 1..50: mol_type = other DNA
gccgcctgtacggcccggtacgttataatccactcatccaaggaggcaga

SEQ ID NO: 54993 - DNA, 50 bp, synthetic construct
  source 1..50: mol_type = other DNA
cgcccaaaatgtatttttcggcttttccaacacacctttgattttggccc

SEQ ID NO: 54994 - DNA, 50 bp, synthetic construct
  source 1..50: mol_type = other DNA
ctttctagcgataagcgagaggaaaattcgatcgcattatcggcatgaaa

SEQ ID NO: 54995 - DNA, 50 bp, synthetic construct
  source 1..50: mol_type = other DNA
cctgataccgcttcgtgtgccgactgctcggtacaagacccagctgaaga

SEQ ID NO: 54996 - DNA, 50 bp, synthetic construct
  source 1..50: mol_type = other DNA
tattctccgacagacagattccccatgcggaaactggcgtaaaagcaaaa

SEQ ID NO: 54997 - DNA, 50 bp, synthetic construct
  source 1..50: mol_type = other DNA
tttaaaatatgaaaaaatgggtacaaaatatcaatttcttttaattttcc

SEQ ID NO: 54998 - DNA, 50 bp, synthetic construct
  source 1..50: mol_type = other DNA
caattataatgcttttttacgaaaatatacaaaatggggcaaaataaaac

SEQ ID NO: 54999 - DNA, 50 bp, synthetic construct
  source 1..50: mol_type = other DNA
atgtgggaagaagtcggcattgatatatccacacgcatatctttccacaa

SEQ ID NO: 55000 - DNA, 50 bp, synthetic construct
  source 1..50: mol_type = other DNA
tatatgccacagttttgccctgattggtcagggccagcagcaggcaggcg

SEQ ID NO: 55001 - DNA, 50 bp, synthetic construct
  source 1..50: mol_type = other DNA
aaaaaagaaaagcaccatacttcctataaagtgaggtgcttgccatgacc

SEQ ID NO: 55002 - DNA, 50 bp, synthetic construct
  source 1..50: mol_type = other DNA
atagtactcgtgtcgctatcatcagcagatgacggtatttcaggtaccaa

SEQ ID NO: 55003 - DNA, 50 bp, synthetic construct
  source 1..50: mol_type = other DNA
ataagagggacagttctaagaaaatatttttcagaaactgtagataagta

SEQ ID NO: 55004 - DNA, 50 bp, synthetic construct
  source 1..50: mol_type = other DNA
caaactcccattcaggatttttcttgggataagtgctttccctgatttta

SEQ ID NO: 55005 - DNA, 50 bp, synthetic construct
  source 1..50: mol_type = other DNA
cctttccgtctacgcacggaatactgaccggatggatatggacggccaga

SEQ ID NO: 55006 - DNA, 50 bp, synthetic construct
  source 1..50: mol_type = other DNA
ctctgggtagtctatatatcactctggaatagactatagggatatgcgtg

SEQ ID NO: 55007 - DNA, 50 bp, synthetic construct
  source 1..50: mol_type = other DNA
gcatgtttcttcacttccttcaaaattctgcattaaaagtttcaaaatcg

SEQ ID NO: 55008 - DNA, 50 bp, synthetic construct
  source 1..50: mol_type = other DNA
gtattagctaccgttattttgcctttacgcgcctttagagtgatgtatag

SEQ ID NO: 55009 - DNA, 50 bp, synthetic construct
  source 1..50: mol_type = other DNA
atagggatgatagaaaagcaaaaatatttttgctcatcatcggtcgctac

SEQ ID NO: 55010 - DNA, 50 bp, synthetic construct
  source 1..50: mol_type = other DNA
atagaaaccagtgcatcataaaaatttttttatttgctaaatagcgacat

SEQ ID NO: 55011 - DNA, 50 bp, synthetic construct
  source 1..50: mol_type = other DNA
tttttgtatgttataatctgtttgcagaaggaggatataaggcaatgaat

SEQ ID NO: 55012 - DNA, 50 bp, synthetic construct
  source 1..50: mol_type = other DNA
catctgtggagcagagctgcttgacgtatggagaaactgctccagcagct

SEQ ID NO: 55013 - DNA, 50 bp, synthetic construct
  source 1..50: mol_type = other DNA
ccctcgatgatccacgaaagcacagcggtgtatttcgtgatggtcgccgg

SEQ ID NO: 55014 - DNA, 50 bp, synthetic construct
  source 1..50: mol_type = other DNA
agatctgttataaaagaaattcaaattagaattatagcacgaactgatac

SEQ ID NO: 55015 - DNA, 50 bp, synthetic construct
  source 1..50: mol_type = other DNA
aaaaatttttcagaaacacccgataaaagcagggactacatccaattttt

SEQ ID NO: 55016 - DNA, 50 bp, synthetic construct
  source 1..50: mol_type = other DNA
tttttttcaattcttggcaacgcaccatgttttacaagaaggactgaaaa

SEQ ID NO: 55017 - DNA, 50 bp, synthetic construct
  source 1..50: mol_type = other DNA
agcgctgcggcatctgctccagagattccgtttgcagatgataatggaat

SEQ ID NO: 55018 - DNA, 50 bp, synthetic construct
  source 1..50: mol_type = other DNA
attcgcctttgagccatgggcagcgctccaccattggctcaaataagagt

SEQ ID NO: 55019 - DNA, 50 bp, synthetic construct
  source 1..50: mol_type = other DNA
caatactatgcagacaccggacattaaagtgaggtgcaaccatgaccgct

SEQ ID NO: 55020 - DNA, 50 bp, synthetic construct
  source 1..50: mol_type = other DNA
catacgttgtagattaactttccatagacagccttaattttaaacgtttg

SEQ ID NO: 55021 - DNA, 50 bp, synthetic construct
  source 1..50: mol_type = other DNA
gcgcgcaggcacgaagtgcatcagcgccctggtggtgagcgcctgcgccg

SEQ ID NO: 55022 - DNA, 50 bp, synthetic construct
  source 1..50: mol_type = other DNA
cattagcagcgctctttcttttatttacagtagaaagaaggttttttatg

SEQ ID NO: 55023 - DNA, 50 bp, synthetic construct
  source 1..50: mol_type = other DNA
catccgtttaaatacatcataaatatatttatattcagagaaaggatgat

SEQ ID NO: 55024 - DNA, 50 bp, synthetic construct
  source 1..50: mol_type = other DNA
cgcatctcaatggatgcattcatgattgtacttgcaattattggctttca

SEQ ID NO: 55025 - DNA, 50 bp, synthetic construct
  source 1..50: mol_type = other DNA
ctaaaacaatcaaaagtcgaaatcaagatttgtacttatgataattagcg

SEQ ID NO: 55026 - DNA, 50 bp, synthetic construct
  source 1..50: mol_type = other DNA
atttggatatataatcgttgacggaattgacagagattataatgtcattg

SEQ ID NO: 55027 - DNA, 50 bp, synthetic construct
  source 1..50: mol_type = other DNA
tatgtactatagacttcttaattttaaaagagagaagaatttaatcgtat

SEQ ID NO: 55028 - DNA, 50 bp, synthetic construct
  source 1..50: mol_type = other DNA
cgttcaaattgaagcattaattgacttcaattaatgtgccttttaaaatc

SEQ ID NO: 55029 - DNA, 50 bp, synthetic construct
  source 1..50: mol_type = other DNA
tgaaatttaacgaaaatgtaagacatggcgaagacattcgttgaatatca

SEQ ID NO: 55030 - DNA, 50 bp, synthetic construct
  source 1..50: mol_type = other DNA
ctgaatctccaagctctgccactcctaaacctgccatccgtgagcttcag

SEQ ID NO: 55031 - DNA, 50 bp, synthetic construct
  source 1..50: mol_type = other DNA
aagaaaaagggctttttaatgcctgtgactattcaagcattgtttttctt

SEQ ID NO: 55032 - DNA, 50 bp, synthetic construct
  source 1..50: mol_type = other DNA
cggcctcgtctatattgtcgactataaaaaggatcgggtcgatgatgccc

SEQ ID NO: 55033 - DNA, 50 bp, synthetic construct
  source 1..50: mol_type = other DNA
ccagccgaacagttgttcgactgggaatctgtctgtcggagaataatcat

SEQ ID NO: 55034 - DNA, 50 bp, synthetic construct
  source 1..50: mol_type = other DNA
ttggacggaattatccactttcgggtaaggatactggcgtctcctacgta

SEQ ID NO: 55035 - DNA, 50 bp, synthetic construct
  source 1..50: mol_type = other DNA
ctcttcaggtcagaataattcatggccagacggggaatctgtctgtcgga

SEQ ID NO: 55036 - DNA, 50 bp, synthetic construct
  source 1..50: mol_type = other DNA
attcccgcaaacggcaaaactgtgaagcgaggtgagttgatgaaaaggat

SEQ ID NO: 55037 - DNA, 50 bp, synthetic construct
  source 1..50: mol_type = other DNA
agcaccttgcagaaatgcagggtgtttacccgctatggcactcattagca

SEQ ID NO: 55038 - DNA, 50 bp, synthetic construct
  source 1..50: mol_type = other DNA
ggcaagggtttctctcggtaacacgcactcggaatgtggaacggaaagcc

SEQ ID NO: 55039 - DNA, 50 bp, synthetic construct
  source 1..50: mol_type = other DNA
aggtaattatgatctggtgctgatggataaaagacaaataatatttctaa

SEQ ID NO: 55040 - DNA, 50 bp, synthetic construct
  source 1..50: mol_type = other DNA
aaaaaagcagattatggacggaatcgatttcgaggatgatgattctttgc

SEQ ID NO: 55041 - DNA, 50 bp, synthetic construct
  source 1..50: mol_type = other DNA
ttaccgctgtatcagccgctgtccccaatatagacttgatacagtgcggt

SEQ ID NO: 55042 - DNA, 50 bp, synthetic construct
  source 1..50: mol_type = other DNA
ctgattgtggcggtgctgggatagagaacttccaggcgaaagtatccgca

SEQ ID NO: 55043 - DNA, 50 bp, synthetic construct
  source 1..50: mol_type = other DNA
cattggccagttttacgaatccctgctgggcgaggttgacggagctgcgt

SEQ ID NO: 55044 - DNA, 50 bp, synthetic construct
  source 1..50: mol_type = other DNA
aatacaattccagaatatgtttttgcagaaattaaagatggcagcgtact

SEQ ID NO: 55045 - DNA, 50 bp, synthetic construct
  source 1..50: mol_type = other DNA
gtcattgactacgttgtttttccccggaactgctcaagcaggaagatgac

SEQ ID NO: 55046 - DNA, 50 bp, synthetic construct
  source 1..50: mol_type = other DNA
ctataatatagggtgcttatttccaatgaaagaattatccttcaaaattc

SEQ ID NO: 55047 - DNA, 50 bp, synthetic construct
  source 1..50: mol_type = other DNA
aaaattatgctgtccatgtatataatttgatacaaggaggaacaagcatg

SEQ ID NO: 55048 - DNA, 50 bp, synthetic construct
  source 1..50: mol_type = other DNA
gttccgggcctttctctgtggtggatccatcgaaggggccagaaaaaagt

SEQ ID NO: 55049 - DNA, 50 bp, synthetic construct
  source 1..50: mol_type = other DNA
aaatcagcaaaattgattcttaattagttttgaatcaaggatgtggagga

SEQ ID NO: 55050 - DNA, 50 bp, synthetic construct
  source 1..50: mol_type = other DNA
gccatagcgagcgcctgcatatcgttcgatacgcttttgatggatatggc

SEQ ID NO: 55051 - DNA, 50 bp, synthetic construct
  source 1..50: mol_type = other DNA
tttctggtaaaaaaagaaaattgaaacccgccgtctgacgatcaagcata

SEQ ID NO: 55052 - DNA, 50 bp, synthetic construct
  source 1..50: mol_type = other DNA
tattttaccggtgtcttagagctgtcattgacttgtacattttgaaaata

SEQ ID NO: 55053 - DNA, 50 bp, synthetic construct
  source 1..50: mol_type = other DNA
ctccggcaattcgatttccggttggacaacgggaatacgaaaagggggag

SEQ ID NO: 55054 - DNA, 50 bp, synthetic construct
  source 1..50: mol_type = other DNA
cgcttttttcctctcgttccaataggaggcggcagagtgagaaaacagaa

SEQ ID NO: 55055 - DNA, 50 bp, synthetic construct
  source 1..50: mol_type = other DNA
tcacgccgaccaggcacaatccaatatatgatacgagctgttatctattg

SEQ ID NO: 55056 - DNA, 50 bp, synthetic construct
  source 1..50: mol_type = other DNA
taatagattacaaccggccacaagctcttccagtttatcggctctgatgt

SEQ ID NO: 55057 - DNA, 50 bp, synthetic construct
  source 1..50: mol_type = other DNA
gagatcgtgccgcagccgcaggaggcgtccgtgtttaccggcagtctcaa

SEQ ID NO: 55058 - DNA, 50 bp, synthetic construct
  source 1..50: mol_type = other DNA
aagcacatcctgctgtgggagcagatcacctatgacagtaagacagtcaa

SEQ ID NO: 55059 - DNA, 50 bp, synthetic construct
  source 1..50: mol_type = other DNA
ggatacggtaattttgccgtctttgccctcacggagaattaggcgcttcc

SEQ ID NO: 55060 - DNA, 50 bp, synthetic construct
  source 1..50: mol_type = other DNA
tcaaggtcaaccgccgtgccccggcgcaaatttgaggccgttttcgttaa

SEQ ID NO: 55061 - DNA, 50 bp, synthetic construct
  source 1..50: mol_type = other DNA
cctcaaagctcctgggttttattttaagaatgtaaaaagcatctttgagg

SEQ ID NO: 55062 - DNA, 50 bp, synthetic construct
  source 1..50: mol_type = other DNA
cattccgttgtctaataagtatatcgatgaggttcttttcctacggacga

SEQ ID NO: 55063 - DNA, 50 bp, synthetic construct
  source 1..50: mol_type = other DNA
gcaggttcgtggtggaacttaccgttgtgtaaggggaaaagccatgagca

SEQ ID NO: 55064 - DNA, 50 bp, synthetic construct
  source 1..50: mol_type = other DNA
ctgaacgatggtggaacagtaataatttggatgaacgatccaccgttcat

SEQ ID NO: 55065 - DNA, 50 bp, synthetic construct
  source 1..50: mol_type = other DNA
ctttttcactgcaggcatggtaaaatttgcccatatatattatctaaaat

SEQ ID NO: 55066 - DNA, 50 bp, synthetic construct
  source 1..50: mol_type = other DNA
gagtgtctgaattttttgttaagtatagttctgaaaaaaatcccgcaccg

SEQ ID NO: 55067 - DNA, 50 bp, synthetic construct
  source 1..50: mol_type = other DNA
aaagaaagcgcgccgaaaggctgtaggcggcggtgcggcgctttttcttt

SEQ ID NO: 55068 - DNA, 50 bp, synthetic construct
  source 1..50: mol_type = other DNA
ggagcctattccagatccatctactggtaacaggatttggggttcaccag

SEQ ID NO: 55069 - DNA, 50 bp, synthetic construct
  source 1..50: mol_type = other DNA
gtcatggcaggcacctccatttatacgaaaaagttcttgcagtcggactc

SEQ ID NO: 55070 - DNA, 50 bp, synthetic construct
  source 1..50: mol_type = other DNA
gagaatggagggcaggaatgaaactgggttattttgttcccgacattcat

SEQ ID NO: 55071 - DNA, 50 bp, synthetic construct
  source 1..50: mol_type = other DNA
gtagctattagcaatgcgataacacatattatggcatgtacaactatatt

SEQ ID NO: 55072 - DNA, 50 bp, synthetic construct
  source 1..50: mol_type = other DNA
cggatcttggaaaggttcacaacgcccgtggcgcagatttgagaaatgag

SEQ ID NO: 55073 - DNA, 50 bp, synthetic construct
  source 1..50: mol_type = other DNA
tctttctccgatcaaggccttgacaggtcatcgcattagccggcaatcct

SEQ ID NO: 55074 - DNA, 50 bp, synthetic construct
  source 1..50: mol_type = other DNA
tgtgactgccagataattggatccagtttatcatcttccgggcagtcacg

SEQ ID NO: 55075 - DNA, 50 bp, synthetic construct
  source 1..50: mol_type = other DNA
gatatccaaaacgaacgcctcagagatatgaggtgaaccaatatgccata

SEQ ID NO: 55076 - DNA, 50 bp, synthetic construct
  source 1..50: mol_type = other DNA
gaaagagcatcctcgcccacgaccttcgttgtttttgaaaatgcttgttc

SEQ ID NO: 55077 - DNA, 50 bp, synthetic construct
  source 1..50: mol_type = other DNA
ttttaccagcgtttcccagatgtcatgtcgtttgggcagtgctgaacaaa

SEQ ID NO: 55078 - DNA, 50 bp, synthetic construct
  source 1..50: mol_type = other DNA
cttgccacctgtctgccctccatcatgtctgcgggcagacgtttgtaaaa

SEQ ID NO: 55079 - DNA, 50 bp, synthetic construct
  source 1..50: mol_type = other DNA
ccacgggaccgccgtccacggagtagaggctgtgaacttgctgatcgtgg

SEQ ID NO: 55080 - DNA, 50 bp, synthetic construct
  source 1..50: mol_type = other DNA
agccgaaaaagcgccgtgtcgcaggcttccgacacctcttttctttatac

SEQ ID NO: 55081 - DNA, 50 bp, synthetic construct
  source 1..50: mol_type = other DNA
ggaaataaaagtatgagtagaaaatattttttactttaacttcaatttcg

SEQ ID NO: 55082 - DNA, 50 bp, synthetic construct
  source 1..50: mol_type = other DNA
cggttatgagccggcggctctgccgcaaaatttccgccgtctctgtttcc

SEQ ID NO: 55083 - DNA, 50 bp, synthetic construct
  source 1..50: mol_type = other DNA
caacagataatgaaaccaaaaccttaaagttgtaaaagcattgtctgttt

SEQ ID NO: 55084 - DNA, 50 bp, synthetic construct
  source 1..50: mol_type = other DNA
tgtccggctacgaccacctcgtctccgcacgaggtcgtcgaggtgcgacg

SEQ ID NO: 55085 - DNA, 50 bp, synthetic construct
  source 1..50: mol_type = other DNA
agttattatattggccctcgggttgacaccaccggcacatgagcctgaga

SEQ ID NO: 55086 - DNA, 50 bp, synthetic construct
  source 1..50: mol_type = other DNA
tcccgctgctcctccagagaagcctcagcttctcaaaaggaaagcggatt

SEQ ID NO: 55087 - DNA, 50 bp, synthetic construct
  source 1..50: mol_type = other DNA
aggcggcagaaattcgctttggaaagttgtaaaagcattgtctgtttgac

SEQ ID NO: 55088 - DNA, 50 bp, synthetic construct
  source 1..50: mol_type = other DNA
tgtactattcataaaaaccttctttctgtaagatttatatgtcttttctt

SEQ ID NO: 55089 - DNA, 50 bp, synthetic construct
  source 1..50: mol_type = other DNA
atcggcgacatcttctggggcgacatatagtaatcaattttgtcgcagat

SEQ ID NO: 55090 - DNA, 50 bp, synthetic construct
  source 1..50: mol_type = other DNA
gaccgtagaggtcgtcgacccgatgctgctgggtgacatcatcaacggca

SEQ ID NO: 55091 - DNA, 50 bp, synthetic construct
  source 1..50: mol_type = other DNA
catactttcatataccaaaaatgatagcaaaggcggcacatacaagtacc

SEQ ID NO: 55092 - DNA, 50 bp, synthetic construct
  source 1..50: mol_type = other DNA
gggaatgacccggaagcggaacaggtcggtaaacctgtgggctttgcgct

SEQ ID NO: 55093 - DNA, 50 bp, synthetic construct
  source 1..50: mol_type = other DNA
ttcgcatcatcgcctgcaccgtcggcgggcgtacccggcgaccctgcgca

SEQ ID NO: 55094 - DNA, 50 bp, synthetic construct
  source 1..50: mol_type = other DNA
cacttgtacgcagtatcatcaaatttcgctcatgcgtttatgtacgagtg

SEQ ID NO: 55095 - DNA, 50 bp, synthetic construct
  source 1..50: mol_type = other DNA
tctcagatacagatacaggtacagagctgtaccgcagtcatggcccgaga

SEQ ID NO: 55096 - DNA, 50 bp, synthetic construct
  source 1..50: mol_type = other DNA
tctgaatataaatatcttttttgatcgtaaaactcatatttatgatgtac

SEQ ID NO: 55097 - DNA, 50 bp, synthetic construct
  source 1..50: mol_type = other DNA
aaggtcacacgctactgcattgctgacacacggcagtaggctgccaccct

SEQ ID NO: 55098 - DNA, 50 bp, synthetic construct
  source 1..50: mol_type = other DNA
ctgttctgttcattcctttttcctcctggttctgcgccgtttgcgaattc

SEQ ID NO: 55099 - DNA, 50 bp, synthetic construct
  source 1..50: mol_type = other DNA
tcacagatgagaaaatggtcggtagtgaccgaccgtgctgctgttctgtt

SEQ ID NO: 55100 - DNA, 50 bp, synthetic construct
  source 1..50: mol_type = other DNA
aaaaatcacatttttttttatttcttataactcataaaaatatgattttt

SEQ ID NO: 55101 - DNA, 50 bp, synthetic construct
  source 1..50: mol_type = other DNA
taccgcattttttgtcataaaaaatcagcggaggaacaaaaaaaacagtc

SEQ ID NO: 55102 - DNA, 50 bp, synthetic construct
  source 1..50: mol_type = other DNA
cgcgcaagggcttccgcgaaggcgatcgacgccatcgccgccgttgcgca

SEQ ID NO: 55103 - DNA, 50 bp, synthetic construct
  source 1..50: mol_type = other DNA
gatcgggtgcggcggtcaaagtcgcgcgacgctgcccgccgcgaccatct

SEQ ID NO: 55104 - DNA, 50 bp, synthetic construct
  source 1..50: mol_type = other DNA
actgatccaagcggaacaggcagtcgagttgacccgtagcgggcatcagg

SEQ ID NO: 55105 - DNA, 50 bp, synthetic construct
  source 1..50: mol_type = other DNA
tgtaaaatttattcgtagagtttacatccaggccatgaatcagcttcgca

SEQ ID NO: 55106 - DNA, 50 bp, synthetic construct
  source 1..50: mol_type = other DNA
cctttgaggataatatccgcttgaatctccctaaactttaacaaaaaata

SEQ ID NO: 55107 - DNA, 50 bp, synthetic construct
  source 1..50: mol_type = other DNA
cacctccttgttttggcagtactatatattattgagccacgtctgcatct

SEQ ID NO: 55108 - DNA, 50 bp, synthetic construct
  source 1..50: mol_type = other DNA
cgtattcagcactcctgagacggacgcttatctcaggaggtatggtatgt

SEQ ID NO: 55109 - DNA, 50 bp, synthetic construct
  source 1..50: mol_type = other DNA
tgtccgtgacgctgccgggacggacatccggtgaggaagtttcaaggcaa

SEQ ID NO: 55110 - DNA, 50 bp, synthetic construct
  source 1..50: mol_type = other DNA
ttactccttataaaaatgtgccgcatatgaaagttttttatctcttgagc

SEQ ID NO: 55111 - DNA, 50 bp, synthetic construct
  source 1..50: mol_type = other DNA
tgcataatcgaatgtatgcgcgttcagcgccgcaccgtagcggggatcat

SEQ ID NO: 55112 - DNA, 50 bp, synthetic construct
  source 1..50: mol_type = other DNA
ccggaggctgagcactcgttcgacgttgttttcatgtgctcatttacagg

SEQ ID NO: 55113 - DNA, 50 bp, synthetic construct
  source 1..50: mol_type = other DNA
catatcaaggtatttttggcattatttccggccatgcactcctcgatcat

SEQ ID NO: 55114 - DNA, 50 bp, synthetic construct
  source 1..50: mol_type = other DNA
gacattgttttcactccttgacgtttgaagctggggtagaaaaaaataga

SEQ ID NO: 55115 - DNA, 50 bp, synthetic construct
  source 1..50: mol_type = other DNA
ctcactctcctttcaaccaacaaggatcttatggttgaaaagcaagagtg

SEQ ID NO: 55116 - DNA, 50 bp, synthetic construct
  source 1..50: mol_type = other DNA
agagtgttgcagaaagagaaaggaatcaataactcttgatgaaaacttgt

SEQ ID NO: 55117 - DNA, 50 bp, synthetic construct
  source 1..50: mol_type = other DNA
gttttcataaatcaaatgtactaaaactatatttatggatttatatagac

SEQ ID NO: 55118 - DNA, 50 bp, synthetic construct
  source 1..50: mol_type = other DNA
acgatgatcccgccgcgcctgcaggccaactggcgcgtggatcatatcga

SEQ ID NO: 55119 - DNA, 50 bp, synthetic construct
  source 1..50: mol_type = other DNA
tgcgtacggagaatttccccttctgaaaaccagggaacaacgcaggcgca

SEQ ID NO: 55120 - DNA, 50 bp, synthetic construct
  source 1..50: mol_type = other DNA
gtattttgacaagaatttaggctttaataaagcaatcaagggataaaaac

SEQ ID NO: 55121 - DNA, 50 bp, synthetic construct
  source 1..50: mol_type = other DNA
gtgatgtagtatccttatcttcaatatgatggtgcagatgaggtgatcac

SEQ ID NO: 55122 - DNA, 50 bp, synthetic construct
  source 1..50: mol_type = other DNA
tgctgcaatccgacgagaagcaaagcttttcataacgaaggtcaccatcc

SEQ ID NO: 55123 - DNA, 50 bp, synthetic construct
  source 1..50: mol_type = other DNA
agttggtggctgtttctaaactgaaatcgtttctgaaatcagtaaggatg

SEQ ID NO: 55124 - DNA, 50 bp, synthetic construct
  source 1..50: mol_type = other DNA
atcaatttggacacgcaatatggtggacagcattttcacagaaaagactt

SEQ ID NO: 55125 - DNA, 50 bp, synthetic construct
  source 1..50: mol_type = other DNA
agatcctgagcgtttggttccgggcccggtgaggagaacgctttccggca

SEQ ID NO: 55126 - DNA, 50 bp, synthetic construct
  source 1..50: mol_type = other DNA
ttgtctgcccctttctatttcgtgccagcgacacgacgagcaggcacgcc

SEQ ID NO: 55127 - DNA, 50 bp, synthetic construct
  source 1..50: mol_type = other DNA
cctcctttttgggatattccataggacgctggaatcctgggcggcggagg

SEQ ID NO: 55128 - DNA, 50 bp, synthetic construct
  source 1..50: mol_type = other DNA
ccgaggtcattcagcatatcgcgaaatcgcgacatgctggcctaccacaa

SEQ ID NO: 55129 - DNA, 50 bp, synthetic construct
  source 1..50: mol_type = other DNA
gaatccgctaccagaaaatccgtgataccctgcctttgctcgtttactgt

SEQ ID NO: 55130 - DNA, 50 bp, synthetic construct
  source 1..50: mol_type = other DNA
gaagcccggaaagaagctctgaacacaagctgcgcttaactcgatactat

SEQ ID NO: 55131 - DNA, 50 bp, synthetic construct
  source 1..50: mol_type = other DNA
tatatctgcaaatattttatctactagtagatttaacatttacagttata

SEQ ID NO: 55132 - DNA, 50 bp, synthetic construct
  source 1..50: mol_type = other DNA
cttcatcacagccatgatcaaagatatttatattcagagaaaggatgata

SEQ ID NO: 55133 - DNA, 50 bp, synthetic construct
  source 1..50: mol_type = other DNA
tttcaagcttttttggtgtcagcaatatgtgacctaccgaaagcgaggtg

SEQ ID NO: 55134 - DNA, 50 bp, synthetic construct
  source 1..50: mol_type = other DNA
ttttacaatcaaacaaaagatatatgatgatccgttcctgcaggcagaat

SEQ ID NO: 55135 - DNA, 50 bp, synthetic construct
  source 1..50: mol_type = other DNA
gtaattcccagcgaccatcgctgcgggaagcggcggtcgatatccgggtg

SEQ ID NO: 55136 - DNA, 50 bp, synthetic construct
  source 1..50: mol_type = other DNA
cgtgtggtggaaggagaacgcccaattttccgttccccctccgccgtttt

SEQ ID NO: 55137 - DNA, 50 bp, synthetic construct
  source 1..50: mol_type = other DNA
ggcggatgagatgcagggaattttgaaaggaggcatgaatttgaaacggc

SEQ ID NO: 55138 - DNA, 50 bp, synthetic construct
  source 1..50: mol_type = other DNA
cctgccgatcatgggcaccaccggcagctgtcttgcccggcttaccgcgc

SEQ ID NO: 55139 - DNA, 50 bp, synthetic construct
  source 1..50: mol_type = other DNA
cgacggtagtggagaagatccgcaaatgggaattgttaataaaacaaaag

SEQ ID NO: 55140 - DNA, 50 bp, synthetic construct
  source 1..50: mol_type = other DNA
aatatcttagttaaaatttttctttagaagattcatttaataaagattaa

SEQ ID NO: 55141 - DNA, 50 bp, synthetic construct
  source 1..50: mol_type = other DNA
cttaaatatatacacgttttcattataataaaaacattttttcatttatc

SEQ ID NO: 55142 - DNA, 50 bp, synthetic construct
  source 1..50: mol_type = other DNA
actggaggatttaaacaatgtaaaattgacaattacttagttttttttga

SEQ ID NO: 55143 - DNA, 50 bp, synthetic construct
  source 1..50: mol_type = other DNA
cttctggaagggggagaacaaaagaacttgataaataagcctttcagagt

SEQ ID NO: 55144 - DNA, 50 bp, synthetic construct
  source 1..50: mol_type = other DNA
ttgttcaacatcattatgtgttgttaacatagctaagtaatatcaaacag

SEQ ID NO: 55145 - DNA, 50 bp, synthetic construct
  source 1..50: mol_type = other DNA
attttatcatgtagaaatatttatattaatattaattgagttaataaaat

SEQ ID NO: 55146 - DNA, 50 bp, synthetic construct
  source 1..50: mol_type = other DNA
gaaatattacaagaaaatacagaaaatagaataatttattgaaatatttt

SEQ ID NO: 55147 - DNA, 50 bp, synthetic construct
  source 1..50: mol_type = other DNA
cgcacagccgaaatggatgataagtacctaatttctgggaggtgtgtcta

SEQ ID NO: 55148 - DNA, 50 bp, synthetic construct
  source 1..50: mol_type = other DNA
gcagcctcaagccactgggaaatgcgggtatcgcagtgaccgtgcgactc

SEQ ID NO: 55149 - DNA, 50 bp, synthetic construct
  source 1..50: mol_type = other DNA
aatatttacactttatactatgattataatcagtatattatgtacattta

SEQ ID NO: 55150 - DNA, 50 bp, synthetic construct
  source 1..50: mol_type = other DNA
tttccacctttagtttggacatatttatatttttctaataaatttttaaa

SEQ ID NO: 55151 - DNA, 50 bp, synthetic construct
  source 1..50: mol_type = other DNA
gatcattaaacgtttacttgataaattctactacaacttctctcattata

SEQ ID NO: 55152 - DNA, 50 bp, synthetic construct
  source 1..50: mol_type = other DNA
aatcaggccggccagaatcggcacaaccacagattgtgggcgaaacgact

SEQ ID NO: 55153 - DNA, 50 bp, synthetic construct
  source 1..50: mol_type = other DNA
cgcttcaccccttctttcagcacgatcgtgatgatcgaggccttcgagca

SEQ ID NO: 55154 - DNA, 50 bp, synthetic construct
  source 1..50: mol_type = other DNA
aatttaaactgggcaggatgtgcagctacacatccattaccacaatggcc

SEQ ID NO: 55155 - DNA, 50 bp, synthetic construct
  source 1..50: mol_type = other DNA
tggacaaacaaccctgcgcagggtcgacctcctgttagggcgatggtcca

SEQ ID NO: 55156 - DNA, 50 bp, synthetic construct
  source 1..50: mol_type = other DNA
ctcaaggcgaatgatgccttcttcgcgaacgctaaatggcccgcaccgtc

SEQ ID NO: 55157 - DNA, 50 bp, synthetic construct
  source 1..50: mol_type = other DNA
tatgcaacattattttaaaataaataatttttttatattattgtataatt

SEQ ID NO: 55158 - DNA, 50 bp, synthetic construct
  source 1..50: mol_type = other DNA
ttaaattaagctctacatcacttagaaagatgaaggtgaggcgaaacgaa

SEQ ID NO: 55159 - DNA, 50 bp, synthetic construct
  source 1..50: mol_type = other DNA
cagtaatatcgttcagaactttctgtcgaaaagagtgatgtataggtgtg

SEQ ID NO: 55160 - DNA, 50 bp, synthetic construct
  source 1..50: mol_type = other DNA
caggcgttcgaccagcatattttcaagaaacgatgggaggagaagaaacg

SEQ ID NO: 55161 - DNA, 50 bp, synthetic construct
  source 1..50: mol_type = other DNA
gtaaaaccgaaccccctaatttaaaagctactccttagctaaccttttgt

SEQ ID NO: 55162 - DNA, 50 bp, synthetic construct
  source 1..50: mol_type = other DNA
tcttgaatatatcaagttataaagcactttaattctagatataataaaat

SEQ ID NO: 55163 - DNA, 50 bp, synthetic construct
  source 1..50: mol_type = other DNA
attttagggccttttaggctctttttaactaatctaataccttctaaatc

SEQ ID NO: 55164 - DNA, 50 bp, synthetic construct
  source 1..50: mol_type = other DNA
ttgtgtttcaacccatttgcaacaaacaagcttaatgttgagaaagacca

SEQ ID NO: 55165 - DNA, 50 bp, synthetic construct
  source 1..50: mol_type = other DNA
caatgcttaatgaacgtatgaaaaaattttatatgaaacgtgcagcattg

SEQ ID NO: 55166 - DNA, 50 bp, synthetic construct
  source 1..50: mol_type = other DNA
caattagcattaatatagtataattagtaatattgtattaaatgaaattg

SEQ ID NO: 55167 - DNA, 50 bp, synthetic construct
  source 1..50: mol_type = other DNA
tttttgacctccagctaacttcataaaaatagggttgacactctcaataa

SEQ ID NO: 55168 - DNA, 50 bp, synthetic construct
  source 1..50: mol_type = other DNA
acaaaagcaacagcgcagaagaaaattttactctttgcctatgcttttga

SEQ ID NO: 55169 - DNA, 50 bp, synthetic construct
  source 1..50: mol_type = other DNA
attttcagacggctaaaatcttatcagaggtatattgagggagtgcaaat

SEQ ID NO: 55170 - DNA, 50 bp, synthetic construct
  source 1..50: mol_type = other DNA
ccaacatagtttacatactccattataatcataaacacaaccaatgttgt

SEQ ID NO: 55171 - DNA, 50 bp, synthetic construct
  source 1..50: mol_type = other DNA
caaaagatgattaaaaacaattttttcaagagtttccaaacgttcttttg

SEQ ID NO: 55172 - DNA, 50 bp, synthetic construct
  source 1..50: mol_type = other DNA
acgcttcttttccatacgcttttgtgcaaaagcattgtctgtttgactgt

SEQ ID NO: 55173 - DNA, 50 bp, synthetic construct
  source 1..50: mol_type = other DNA
ccttcggtcgaacagaaaaaagtccggcgctttttctgctccgtgatagg

SEQ ID NO: 55174 - DNA, 50 bp, synthetic construct
  source 1..50: mol_type = other DNA
tactctttttgccatgttaccacctcgcctttccatcagcaaatgatttt

SEQ ID NO: 55175 - DNA, 50 bp, synthetic construct
  source 1..50: mol_type = other DNA
ttaataagcattgttcctggtctagcatatcctgcaactcttcttttact

SEQ ID NO: 55176 - DNA, 50 bp, synthetic construct
  source 1..50: mol_type = other DNA
ggccattgccagcctgctgggcggctgcggccagaccacgacctatgggg

SEQ ID NO: 55177 - DNA, 50 bp, synthetic construct
  source 1..50: mol_type = other DNA
cgcttgaacatcaagtcataatactgggattatgctttgatctcggtgcc

SEQ ID NO: 55178 - DNA, 50 bp, synthetic construct
  source 1..50: mol_type = other DNA
ccacggtactcattttgttcggtggccgacgtgaagcgtgacagcgtcgc

SEQ ID NO: 55179 - DNA, 50 bp, synthetic construct
  source 1..50: mol_type = other DNA
tgctctttttagggcaatttcccttttgaatgtttacaataaaaaaagcc

SEQ ID NO: 55180 - DNA, 50 bp, synthetic construct
  source 1..50: mol_type = other DNA
ttttttctacccaacaaatgtttgatccaacatttgttaggttacttatt

SEQ ID NO: 55181 - DNA, 50 bp, synthetic construct
  source 1..50: mol_type = other DNA
ccagcagcaccagcgccgcgaccgcgatcagccggagcggtatatgtata

SEQ ID NO: 55182 - DNA, 50 bp, synthetic construct
  source 1..50: mol_type = other DNA
aacaacctaaaaaagagtataaaaatgtttatttcctgttttatgtaaag

SEQ ID NO: 55183 - DNA, 50 bp, synthetic construct
  source 1..50: mol_type = other DNA
gatttttcgtatttttgccataaaattgagcaaaaaggtttgggaaaaga

SEQ ID NO: 55184 - DNA, 50 bp, synthetic construct
  source 1..50: mol_type = other DNA
cggatggcgtcaccctgtttcttcctgagctacatgggcaatgccatgac

SEQ ID NO: 55185 - DNA, 50 bp, synthetic construct
  source 1..50: mol_type = other DNA
tgatttttgtgacctttttcaatggctcttgaattctgtgcagggaaaca

SEQ ID NO: 55186 - DNA, 50 bp, synthetic construct
  source 1..50: mol_type = other DNA
tgggggttgggtgcggttttccgggatttgaaaaccatccgaaaagccaa

SEQ ID NO: 55187 - DNA, 50 bp, synthetic construct
  source 1..50: mol_type = other DNA
tgtatctcctttcaaattaatgcaaaagaaataatttaaaattaaatgat

SEQ ID NO: 55188 - DNA, 50 bp, synthetic construct
  source 1..50: mol_type = other DNA
ccccattcaagcgcgctaccaaaactctttggtaaaggagttgttctccc

SEQ ID NO: 55189 - DNA, 50 bp, synthetic construct
  source 1..50: mol_type = other DNA
caaaaagctccgactgcacaacaagtttgatttgcccaaagacctttggt

SEQ ID NO: 55190 - DNA, 50 bp, synthetic construct
  source 1..50: mol_type = other DNA
tgcgctgagcaggatcatggtacaatgaaaatgacgctgtaagaaatgca

SEQ ID NO: 55191 - DNA, 50 bp, synthetic construct
  source 1..50: mol_type = other DNA
tgattatatcattttcttcgtcatctaaatataagaatagcataaaatct

SEQ ID NO: 55192 - DNA, 50 bp, synthetic construct
  source 1..50: mol_type = other DNA
aaatcccggttatcgttggattgtatcaaacagagtgatatatggtgttg

SEQ ID NO: 55193 - DNA, 50 bp, synthetic construct
  source 1..50: mol_type = other DNA
cacttatactcttctgaatcttatgcatgactttatgaaattggcaagaa

SEQ ID NO: 55194 - DNA, 50 bp, synthetic construct
  source 1..50: mol_type = other DNA
ggaaatcacgttcggcggcaattcggcaaatgccgatgaaagggttttcc

SEQ ID NO: 55195 - DNA, 50 bp, synthetic construct
  source 1..50: mol_type = other DNA
ctttttcatgcaaatcacttcccttcgaagaagagggcgttatcaaaaaa

SEQ ID NO: 55196 - DNA, 50 bp, synthetic construct
  source 1..50: mol_type = other DNA
gaaactaaagaactgctaccccctttggggggtacaaatccattaattta

SEQ ID NO: 55197 - DNA, 50 bp, synthetic construct
  source 1..50: mol_type = other DNA
aattaatacaaaaaatatcaccttctttttttttatgtcttgatttaatt

SEQ ID NO: 55198 - DNA, 50 bp, synthetic construct
  source 1..50: mol_type = other DNA
attagagcgaatttgcgtaaagtaattgttttcttcaaattctgtaatat

SEQ ID NO: 55199 - DNA, 50 bp, synthetic construct
  source 1..50: mol_type = other DNA
aggtggcggcaagatgatcaaccgcagactttattacggttcccccgcag

SEQ ID NO: 55200 - DNA, 50 bp, synthetic construct
  source 1..50: mol_type = other DNA
cgcacggtgatttcagcaggctcctgcgaagaggaaacatctaccgggcg

SEQ ID NO: 55201 - DNA, 50 bp, synthetic construct
  source 1..50: mol_type = other DNA
ttcctggggaagattgtcggtctgcatttttccacaatcttcctcggcaa

SEQ ID NO: 55202 - DNA, 50 bp, synthetic construct
  source 1..50: mol_type = other DNA
cagtgtgtagcctttttatatttgtacaacactacccaaaaacaacaccc

SEQ ID NO: 55203 - DNA, 50 bp, synthetic construct
  source 1..50: mol_type = other DNA
aaataacgtaaatcttgaatatgatttcaaaatcttatatatagactttt

SEQ ID NO: 55204 - DNA, 50 bp, synthetic construct
  source 1..50: mol_type = other DNA
ttccagtcttttactgttgcttttacgtccgcaaccgtatacacgaccga

SEQ ID NO: 55205 - DNA, 50 bp, synthetic construct
  source 1..50: mol_type = other DNA
cgccctttttatcgggcaggacaaacttttcctgttttttaaaaaatact

SEQ ID NO: 55206 - DNA, 50 bp, synthetic construct
  source 1..50: mol_type = other DNA
caagtcaattccacgatataaactacggcttatatgaaaaaaatgacgac

SEQ ID NO: 55207 - DNA, 50 bp, synthetic construct
  source 1..50: mol_type = other DNA
atcaaatttaacctatgattggcattttccctcgagaggtgaggacgaga

SEQ ID NO: 55208 - DNA, 50 bp, synthetic construct
  source 1..50: mol_type = other DNA
ataattgtcaagggaaggcatgaggcaattatcctgtttttactgatggt

SEQ ID NO: 55209 - DNA, 50 bp, synthetic construct
  source 1..50: mol_type = other DNA
gtgaccatccccacttttgggggcaggcccaagaagaagagtaggtattc

SEQ ID NO: 55210 - DNA, 50 bp, synthetic construct
  source 1..50: mol_type = other DNA
ccggttccgaccgcgacgccgtcggccgaccaggttacggtctacttcga

SEQ ID NO: 55211 - DNA, 50 bp, synthetic construct
  source 1..50: mol_type = other DNA
taacttcggaaagggttaaattttcttacattcagaaccttgcgaagtgg

SEQ ID NO: 55212 - DNA, 50 bp, synthetic construct
  source 1..50: mol_type = other DNA
ttgaatatacagaactgtttgaaggtacataaatagttacaaaaattcaa

SEQ ID NO: 55213 - DNA, 50 bp, synthetic construct
  source 1..50: mol_type = other DNA
agcttcatcttataagcaaatgccttgttaccttagtataccacaatcta

SEQ ID NO: 55214 - DNA, 50 bp, synthetic construct
  source 1..50: mol_type = other DNA
cctattcggggctaatcttatctacctcgattagaggggctggtagccac

SEQ ID NO: 55215 - DNA, 50 bp, synthetic construct
  source 1..50: mol_type = other DNA
gtgattattttcttgtttttgggaaaatgaacagaagggggaataataat

SEQ ID NO: 55216 - DNA, 50 bp, synthetic construct
  source 1..50: mol_type = other DNA
aataaaccgggtaagactggatacccgtatagtatcgcacctggttctca

SEQ ID NO: 55217 - DNA, 50 bp, synthetic construct
  source 1..50: mol_type = other DNA
agaaagggcagcggcggggatacagcttaaaagccccactggggctttca

SEQ ID NO: 55218 - DNA, 50 bp, synthetic construct
  source 1..50: mol_type = other DNA
ctggtgttgttcttcgtgatcggtgtaccggtctcgatataatcggacag

SEQ ID NO: 55219 - DNA, 50 bp, synthetic construct
  source 1..50: mol_type = other DNA
cggaaaagttcgattattctctccatgacgatggtatctaccgttttgat

SEQ ID NO: 55220 - DNA, 50 bp, synthetic construct
  source 1..50: mol_type = other DNA
cagctccggccagatggccagactgcagcgcggtgagttggtcgggtttc

SEQ ID NO: 55221 - DNA, 50 bp, synthetic construct
  source 1..50: mol_type = other DNA
cagcagtaacagcggcgcgggtaacggtatatcggccacgaggacgacac

SEQ ID NO: 55222 - DNA, 50 bp, synthetic construct
  source 1..50: mol_type = other DNA
ataatggagaaggaagcaaggaaaacctttcttaaagcctgcccgcaccg

SEQ ID NO: 55223 - DNA, 50 bp, synthetic construct
  source 1..50: mol_type = other DNA
acaaaagatgaataaaggcatctacatagatgccttcctccttttttcgg

SEQ ID NO: 55224 - DNA, 50 bp, synthetic construct
  source 1..50: mol_type = other DNA
aatgtgattttgtgtattgaaatgttgctttcacttcaatgaactcatct

SEQ ID NO: 55225 - DNA, 50 bp, synthetic construct
  source 1..50: mol_type = other DNA
acattttgtttacctcaatcaaagaacggtgacttccgtaacaaaaatgt

SEQ ID NO: 55226 - DNA, 50 bp, synthetic construct
  source 1..50: mol_type = other DNA
atgataatgcaaacaatgcagccaattagtatatttaccaactttatcaa

SEQ ID NO: 55227 - DNA, 50 bp, synthetic construct
  source 1..50: mol_type = other DNA
cgagcttatttttaaggtcataaatgagaatgatgagaaaaaaggtctac

SEQ ID NO: 55228 - DNA, 50 bp, synthetic construct
  source 1..50: mol_type = other DNA
tccccgaattattcaagcttcaatatagtgttgccattataaacatagtc

SEQ ID NO: 55229 - DNA, 50 bp, synthetic construct
  source 1..50: mol_type = other DNA
tatataaatattcatgcttcctcctttcagaaaggattgtgattaatatg

SEQ ID NO: 55230 - DNA, 50 bp, synthetic construct
  source 1..50: mol_type = other DNA
attatttaataaatttttagggcaaatgctataaaattcgatgaaatagc

SEQ ID NO: 55231 - DNA, 50 bp, synthetic construct
  source 1..50: mol_type = other DNA
gtatagtttttatttagatttgtgattttatagcaaatgattaacaatat

SEQ ID NO: 55232 - DNA, 50 bp, synthetic construct
  source 1..50: mol_type = other DNA
aggtggaaaattttacacccagcgtgcactgcaaagagggttcgacaccc

SEQ ID NO: 55233 - DNA, 50 bp, synthetic construct
  source 1..50: mol_type = other DNA
gtttgccgctcacagcttgattagtatgcttgcaggggtcagtatatcac

SEQ ID NO: 55234 - DNA, 50 bp, synthetic construct
  source 1..50: mol_type = other DNA
attacatcatcccaatggctatatatttctttaataaatgatcatgaata

SEQ ID NO: 55235 - DNA, 50 bp, synthetic construct
  source 1..50: mol_type = other DNA
cctgcaaccatcaataaattcacagctgtggcttttgtgtcaaaagctga

SEQ ID NO: 55236 - DNA, 50 bp, synthetic construct
  source 1..50: mol_type = other DNA
acaccttgcagagatgcagggtgtttttcgtttgcaaagatgcagggaaa

SEQ ID NO: 55237 - DNA, 50 bp, synthetic construct
  source 1..50: mol_type = other DNA
atcctttctctgaatataaatatcttgataccatccatcagaggtccgat

SEQ ID NO: 55238 - DNA, 50 bp, synthetic construct
  source 1..50: mol_type = other DNA
agcagagagggctcttcggcgataaaaacgaccgccaaggtagcagcgca

SEQ ID NO: 55239 - DNA, 50 bp, synthetic construct
  source 1..50: mol_type = other DNA
gcctgattacctttgaggtaagctcaggctggtattaaaggatgatcagc

SEQ ID NO: 55240 - DNA, 50 bp, synthetic construct
  source 1..50: mol_type = other DNA
atccgcagagatgagcggataagttcagatctacgccggtctcgatggaa

SEQ ID NO: 55241 - DNA, 50 bp, synthetic construct
  source 1..50: mol_type = other DNA
tcgcataaatgacgccgcgcatggcaccatgccgtcgagcggcggcgcgg

SEQ ID NO: 55242 - DNA, 50 bp, synthetic construct
  source 1..50: mol_type = other DNA
gcgggcgctttgccgtttgcagcagcctgcaccgactgcaagctgcagcc

SEQ ID NO: 55243 - DNA, 50 bp, synthetic construct
  source 1..50: mol_type = other DNA
gggagaacaattctttcaccaaagagttttggtagcgcgcttgaatgggg

SEQ ID NO: 55244 - DNA, 50 bp, synthetic construct
  source 1..50: mol_type = other DNA
ctttacttttttctacatacaaatatttcttttacgctgaaaaagtaagg

SEQ ID NO: 55245 - DNA, 50 bp, synthetic construct
  source 1..50: mol_type = other DNA
gaaggcggtcctgacggattccctgcagggaaaagcacgaacgcgataca

SEQ ID NO: 55246 - DNA, 50 bp, synthetic construct
  source 1..50: mol_type = other DNA
cggaatgcgatgctctattcggggagcaccgatgagagggtctgtataac

SEQ ID NO: 55247 - DNA, 50 bp, synthetic construct
  source 1..50: mol_type = other DNA
tgtgcgggtttgagaaagggtttcgcgaaacctgtgggctttgctgcata

SEQ ID NO: 55248 - DNA, 50 bp, synthetic construct
  source 1..50: mol_type = other DNA
cactgcatattacctctaaaagtgcttccttggtgaggaggcttgcaatg

SEQ ID NO: 55249 - DNA, 50 bp, synthetic construct
  source 1..50: mol_type = other DNA
gacaattaacccggcaacgagaatgctactccgttgacggcggtgaggtc

SEQ ID NO: 55250 - DNA, 50 bp, synthetic construct
  source 1..50: mol_type = other DNA
ttgcgtggtgacttaaaaagtaaaggagagataaataatggctgtaacag

SEQ ID NO: 55251 - DNA, 50 bp, synthetic construct
  source 1..50: mol_type = other DNA
tatcaatatcgtttctggtttgcatcagcagcagagaacagcaattgccc

SEQ ID NO: 55252 - DNA, 50 bp, synthetic construct
  source 1..50: mol_type = other DNA
aatcttttgttgatattctatatcgttacttattatatcacggaattatg

SEQ ID NO: 55253 - DNA, 50 bp, synthetic construct
  source 1..50: mol_type = other DNA
cgcccaatgcttctcactccttactttcttcgaggagctgggcctgttcc

SEQ ID NO: 55254 - DNA, 50 bp, synthetic construct
  source 1..50: mol_type = other DNA
ttgatttttcgcataaaatcagctccacctgcgtttcttcgaggagctgg

SEQ ID NO: 55255 - DNA, 50 bp, synthetic construct
  source 1..50: mol_type = other DNA
acttctaattgtgagtacgtcaacagataagggccagcaatgaggaaagc

SEQ ID NO: 55256 - DNA, 50 bp, synthetic construct
  source 1..50: mol_type = other DNA
ttgtcaaactgtctgtttatcttatagaaaacaaacggtatcgaaaaaaa

SEQ ID NO: 55257 - DNA, 50 bp, synthetic construct
  source 1..50: mol_type = other DNA
gattttaagagtggaaaatttgagcaggcaaaatgtccgggagtccgtat

SEQ ID NO: 55258 - DNA, 50 bp, synthetic construct
  source 1..50: mol_type = other DNA
gggttatagccttgaggcacagaaagccctgaacatggcggcccaggcct

SEQ ID NO: 55259 - DNA, 50 bp, synthetic construct
  source 1..50: mol_type = other DNA
gaatccattgaactggatccggatgataccggaatcaacagaatattttg

SEQ ID NO: 55260 - DNA, 50 bp, synthetic construct
  source 1..50: mol_type = other DNA
ttctggaaaattctttttccagaattttatttaaaaaaatgttctaacat

SEQ ID NO: 55261 - DNA, 50 bp, synthetic construct
  source 1..50: mol_type = other DNA
ctttacctacaaaccgaacttgcttgagccagtaaggttttgctgttggg

SEQ ID NO: 55262 - DNA, 50 bp, synthetic construct
  source 1..50: mol_type = other DNA
gctacgcctatcacggagcagaaaaatttctggaacatgatgcgctccaa

SEQ ID NO: 55263 - DNA, 50 bp, synthetic construct
  source 1..50: mol_type = other DNA
gctttgcttaccctattccatccgtgaagttcaaatgccagaaagtgagg

SEQ ID NO: 55264 - DNA, 50 bp, synthetic construct
  source 1..50: mol_type = other DNA
aattaaccacatttgaatttcctcttgcggagattaaaatcataaaaatt

SEQ ID NO: 55265 - DNA, 50 bp, synthetic construct
  source 1..50: mol_type = other DNA
tttcttttcctggttcgcaagagtggtttccgtcgaaagacaaaaaaata

SEQ ID NO: 55266 - DNA, 50 bp, synthetic construct
  source 1..50: mol_type = other DNA
gatacgttcggatttttgatttttatgaaggtcatccataacgccgtttg

SEQ ID NO: 55267 - DNA, 50 bp, synthetic construct
  source 1..50: mol_type = other DNA
cgcttaaggcactcggctacggtcggaacacaggacgattgccaagaacg

SEQ ID NO: 55268 - DNA, 50 bp, synthetic construct
  source 1..50: mol_type = other DNA
tctgctctggagcggtctgcccatcgagttccagacctttgagccgaaga

SEQ ID NO: 55269 - DNA, 50 bp, synthetic construct
  source 1..50: mol_type = other DNA
ccgaccatgccgttgcctgcgtacaggtgtgtcagcggattgatggtcgg

SEQ ID NO: 55270 - DNA, 50 bp, synthetic construct
  source 1..50: mol_type = other DNA
ctttgaggattacggcattgatgaataaatcaattgttgcctgcgtaaaa

SEQ ID NO: 55271 - DNA, 50 bp, synthetic construct
  source 1..50: mol_type = other DNA
cgcgcttggcaagttcctcctgacctcaatgtcataatatgataccaacc

SEQ ID NO: 55272 - DNA, 50 bp, synthetic construct
  source 1..50: mol_type = other DNA
aatccgtctaagtgtaggagattgagcaatctcacacgcggcggaagacg

SEQ ID NO: 55273 - DNA, 50 bp, synthetic construct
  source 1..50: mol_type = other DNA
tctgaatataaatatcttttttaatcgtaaaactcatatttatgatgtac

SEQ ID NO: 55274 - DNA, 50 bp, synthetic construct
  source 1..50: mol_type = other DNA
agacagagtacttcggttcgcttccgttgacacacggcagtaggctgcca

SEQ ID NO: 55275 - DNA, 50 bp, synthetic construct
  source 1..50: mol_type = other DNA
acagagattatagagaaaatctgtgtagccgtagggtgtatgtcccatgt

SEQ ID NO: 55276 - DNA, 50 bp, synthetic construct
  source 1..50: mol_type = other DNA
aaaatcaatggtgattgttgggcaaaagcagaattataccgtttattttt

SEQ ID NO: 55277 - DNA, 50 bp, synthetic construct
  source 1..50: mol_type = other DNA
atttttttatgaattacgctacttataagtagcgtcctaaatagacgaaa

SEQ ID NO: 55278 - DNA, 50 bp, synthetic construct
  source 1..50: mol_type = other DNA
aatccataagtttttataaagtttttagagctttacaaaacaaatcctga

SEQ ID NO: 55279 - DNA, 50 bp, synthetic construct
  source 1..50: mol_type = other DNA
tcaggaacccttgtcccatcacaggcctggaatctgtcatccgtatcgtg

SEQ ID NO: 55280 - DNA, 50 bp, synthetic construct
  source 1..50: mol_type = other DNA
ctagcatggcgaacgtcaagtttcaaaaacgctgagttatctttgggtac

SEQ ID NO: 55281 - DNA, 50 bp, synthetic construct
  source 1..50: mol_type = other DNA
ggataaattagaagacaagccctttcccaatcttcaccgttcatgaagaa

SEQ ID NO: 55282 - DNA, 50 bp, synthetic construct
  source 1..50: mol_type = other DNA
atggtaatcgagatattacaataaattggttgaaaaaaatctattaatat

SEQ ID NO: 55283 - DNA, 50 bp, synthetic construct
  source 1..50: mol_type = other DNA
acgctacttcggcaaactctattctcatatacctgttaaggcagtagcta

SEQ ID NO: 55284 - DNA, 50 bp, synthetic construct
  source 1..50: mol_type = other DNA
aattgtaactttagccattgatattaaatttaatgtataaaaagtttctt

SEQ ID NO: 55285 - DNA, 50 bp, synthetic construct
  source 1..50: mol_type = other DNA
taattatttccaataaatgttataataatttcattgattggatttaaggt

SEQ ID NO: 55286 - DNA, 50 bp, synthetic construct
  source 1..50: mol_type = other DNA
ttactgcagggtatctacggatcaggtgatgcgccaagacccggccggga

SEQ ID NO: 55287 - DNA, 50 bp, synthetic construct
  source 1..50: mol_type = other DNA
ggggcatgataacacttcctttccggctggtggaagtgcgggtcagcccc

SEQ ID NO: 55288 - DNA, 50 bp, synthetic construct
  source 1..50: mol_type = other DNA
gtaaacagattgtttctatatggacctctccgaagaaaaaatttgtcact

SEQ ID NO: 55289 - DNA, 50 bp, synthetic construct
  source 1..50: mol_type = other DNA
tcgcggagcttttcaaagtattcctttcaatcggtatttcaattccgtga

SEQ ID NO: 55290 - DNA, 50 bp, synthetic construct
  source 1..50: mol_type = other DNA
atagggatgatagaaaagcaaaaatatttttgtggagagaaacggggagc

SEQ ID NO: 55291 - DNA, 50 bp, synthetic construct
  source 1..50: mol_type = other DNA
ttattaatctcattttcctatatctttattgtggaaaaaaagaaaaaatc

SEQ ID NO: 55292 - DNA, 50 bp, synthetic construct
  source 1..50: mol_type = other DNA
ttttatatattaggtgtagacttcttaaattctctgtctaatatagaaaa

SEQ ID NO: 55293 - DNA, 50 bp, synthetic construct
  source 1..50: mol_type = other DNA
gctcagcctttgtatggttgcagcaagttgcattgtaacaatagctgata

SEQ ID NO: 55294 - DNA, 50 bp, synthetic construct
  source 1..50: mol_type = other DNA
atgagacagcacattatttacttcttccgataactaattttctgtcagca

SEQ ID NO: 55295 - DNA, 50 bp, synthetic construct
  source 1..50: mol_type = other DNA
ccacaatgaatacatttgatattaaataatattaaatgtaacagatatga

SEQ ID NO: 55296 - DNA, 50 bp, synthetic construct
  source 1..50: mol_type = other DNA
caaagacctttttgatttaaaaaataatttttattgttatgggggcatag

SEQ ID NO: 55297 - DNA, 50 bp, synthetic construct
  source 1..50: mol_type = other DNA
aaaagcacctggattcgttgaaatctcggtgggcggcgggaggttgctct

SEQ ID NO: 55298 - DNA, 50 bp, synthetic construct
  source 1..50: mol_type = other DNA
cacctatacaggtgccggagttttgtgaaaaatgcgtttgaccatacgga

SEQ ID NO: 55299 - DNA, 50 bp, synthetic construct
  source 1..50: mol_type = other DNA
ttctttcgttgccttatatccattttcttctgtcttaatcaacgaaaaaa

SEQ ID NO: 55300 - DNA, 50 bp, synthetic construct
  source 1..50: mol_type = other DNA
tcacgctcctttctcgttcgtttttcaagacacacgcaaaaggagcgtat

SEQ ID NO: 55301 - DNA, 50 bp, synthetic construct
  source 1..50: mol_type = other DNA
attgagcaattacaaacaaaaatatgtattttttatacccatttttcata

SEQ ID NO: 55302 - DNA, 50 bp, synthetic construct
  source 1..50: mol_type = other DNA
acattccaatctgttagttgagaactgcctctacccgaacagggcggagg

SEQ ID NO: 55303 - DNA, 50 bp, synthetic construct
  source 1..50: mol_type = other DNA
ataatatcaccacaattcttgtcaattatgaaaaatatgaggattatgat

SEQ ID NO: 55304 - DNA, 50 bp, synthetic construct
  source 1..50: mol_type = other DNA
cattcaagtctgtagccggaatctgaagaaccgtccgacattcctgaacc

SEQ ID NO: 55305 - DNA, 50 bp, synthetic construct
  source 1..50: mol_type = other DNA
attgattatataatttaggccgaatatatataatatataatataatatat

SEQ ID NO: 55306 - DNA, 50 bp, synthetic construct
  source 1..50: mol_type = other DNA
aatataattacaccgctacccctatatagggaaggactgatttttttatg

SEQ ID NO: 55307 - DNA, 50 bp, synthetic construct
  source 1..50: mol_type = other DNA
aacaggttctcgttgaaacctttatcaaaaacttgggtaagtttagtatc

SEQ ID NO: 55308 - DNA, 50 bp, synthetic construct
  source 1..50: mol_type = other DNA
cggtggagaacgttattttttctgtaaacaaaaattatatcccaccacta

SEQ ID NO: 55309 - DNA, 50 bp, synthetic construct
  source 1..50: mol_type = other DNA
ttcgaaggaaagacccagaccgaggtatcggtctgatcaaggccatcgac

SEQ ID NO: 55310 - DNA, 50 bp, synthetic construct
  source 1..50: mol_type = other DNA
gcatagattactgctctttgcataaaagacaaacagacagttatctttgc

SEQ ID NO: 55311 - DNA, 50 bp, synthetic construct
  source 1..50: mol_type = other DNA
agtacgctgccatctttaatttctgcaaaaacatattctggaattgtatt

SEQ ID NO: 55312 - DNA, 50 bp, synthetic construct
  source 1..50: mol_type = other DNA
cgcggacatggacggctttgacgagatcgtcaccgccgaagcacgagcag

SEQ ID NO: 55313 - DNA, 50 bp, synthetic construct
  source 1..50: mol_type = other DNA
actgatatttctgatgtacagctcatgggctgtacttaataaatacgcac

SEQ ID NO: 55314 - DNA, 50 bp, synthetic construct
  source 1..50: mol_type = other DNA
taggctcacgccgcctgagtggatatctgtacttgctattaaaaactata

SEQ ID NO: 55315 - DNA, 50 bp, synthetic construct
  source 1..50: mol_type = other DNA
atactagatatatctgcaaatattttaacatttacagttatatatagtat

SEQ ID NO: 55316 - DNA, 50 bp, synthetic construct
  source 1..50: mol_type = other DNA
acaatctgccttgtaattatttctatataaagacaaataaggcagataac

SEQ ID NO: 55317 - DNA, 50 bp, synthetic construct
  source 1..50: mol_type = other DNA
tgacgccgacaagcggcagctgcacgtgctgcccgtgtcggtcgtttcgc

SEQ ID NO: 55318 - DNA, 50 bp, synthetic construct
  source 1..50: mol_type = other DNA
gccgatcaacacccgcagcagaaggcctttcgtggctggtgtatgtcatt

SEQ ID NO: 55319 - DNA, 50 bp, synthetic construct
  source 1..50: mol_type = other DNA
ggcgagaaagggtttgttaatccagaaaaaatggctaacattacggtgat

SEQ ID NO: 55320 - DNA, 50 bp, synthetic construct
  source 1..50: mol_type = other DNA
gtatatgcgcatcccaacaacagaacccttagccgttgatttctgtcccg

SEQ ID NO: 55321 - DNA, 50 bp, synthetic construct
  source 1..50: mol_type = other DNA
ttttccacctcctattagtgatgcatccgtcccattacagaggatgataa

SEQ ID NO: 55322 - DNA, 50 bp, synthetic construct
  source 1..50: mol_type = other DNA
gttcctgtactcatcctgctacctccaggtaagtttatctgttgaggaag

SEQ ID NO: 55323 - DNA, 50 bp, synthetic construct
  source 1..50: mol_type = other DNA
tactgccgtgtatcaacggatcaggacatgaagaatgaaacactgcacat

SEQ ID NO: 55324 - DNA, 50 bp, synthetic construct
  source 1..50: mol_type = other DNA
cattcagaccgaataagtcaagctgggtgatcggaactgcagtcataaac

SEQ ID NO: 55325 - DNA, 50 bp, synthetic construct
  source 1..50: mol_type = other DNA
attattaaatgtgatatttcggattagggtaaaatataagagtgcattat

SEQ ID NO: 55326 - DNA, 50 bp, synthetic construct
  source 1..50: mol_type = other DNA
aattgtctttgagtctcttctgtggccgcagaaaagagtcagagacagtg

SEQ ID NO: 55327 - DNA, 50 bp, synthetic construct
  source 1..50: mol_type = other DNA
aactttggcgcgaatatttggacggtggcacaaatttttttatcaagtta

SEQ ID NO: 55328 - DNA, 50 bp, synthetic construct
  source 1..50: mol_type = other DNA
ataaaggctttgtctttttaaaaaggttggaaagaaaagaaacgattaaa

SEQ ID NO: 55329 - DNA, 50 bp, synthetic construct
  source 1..50: mol_type = other DNA
aaacatattcagcctgcaaaaatggacattttttcagcctcgctatgttt

SEQ ID NO: 55330 - DNA, 50 bp, synthetic construct
  source 1..50: mol_type = other DNA
catcacgaagaaccttacttgcttttcttcaaatatggttttaacacatt

SEQ ID NO: 55331 - DNA, 50 bp, synthetic construct
  source 1..50: mol_type = other DNA
tatcatcctttctctgaatataaatatttatgatgtacttaaacggatgc

SEQ ID NO: 55332 - DNA, 50 bp, synthetic construct
  source 1..50: mol_type = other DNA
atctgaatctccaaattcttccactcaaagaagaatatgcagaaccgtcc

SEQ ID NO: 55333 - DNA, 50 bp, synthetic construct
  source 1..50: mol_type = other DNA
ccacgataccggcgacgctgtcacgctggacagcggccgcatccgccgct

SEQ ID NO: 55334 - DNA, 50 bp, synthetic construct
  source 1..50: mol_type = other DNA
ctttgctgctcctgactgcaaaaggccgcttggacagacgagcgcaggga

SEQ ID NO: 55335 - DNA, 50 bp, synthetic construct
  source 1..50: mol_type = other DNA
ggatggtgtcaacggttatgccgtcaagtacataacaaacgaaaaagccc

SEQ ID NO: 55336 - DNA, 50 bp, synthetic construct
  source 1..50: mol_type = other DNA
ctaattagggcttttttacgtctctagacattaaaaaaagcctcactatt

SEQ ID NO: 55337 - DNA, 50 bp, synthetic construct
  source 1..50: mol_type = other DNA
agtttttcgaagtattctttttgatttcaacaaagattattctaaataaa

SEQ ID NO: 55338 - DNA, 50 bp, synthetic construct
  source 1..50: mol_type = other DNA
cagcaccgtgtccgtcggtgacgtggacggcaccgagcggcacgatgtac

SEQ ID NO: 55339 - DNA, 50 bp, synthetic construct
  source 1..50: mol_type = other DNA
tcaaacaatctttatcgcaaatttaacaatttaacgaaaagatcacattg

SEQ ID NO: 55340 - DNA, 50 bp, synthetic construct
  source 1..50: mol_type = other DNA
tggcataatagatacactgatagaatctgtataacgcattcattatgccg

SEQ ID NO: 55341 - DNA, 50 bp, synthetic construct
  source 1..50: mol_type = other DNA
atggtataaaggagaaagctgactttaattgtcttgggggcatagctcag

SEQ ID NO: 55342 - DNA, 50 bp, synthetic construct
  source 1..50: mol_type = other DNA
gatggtttatctgtttttatcataaaaatcggaaaagacagtaaaagaat

SEQ ID NO: 55343 - DNA, 50 bp, synthetic construct
  source 1..50: mol_type = other DNA
ttctgctcataccttatgcctccttgcctgcgccttgtgtgcgagaagaa

SEQ ID NO: 55344 - DNA, 50 bp, synthetic construct
  source 1..50: mol_type = other DNA
tcgtagtcagcataggcggcgatgactgtgaccgaccgtgctgctgttct

SEQ ID NO: 55345 - DNA, 50 bp, synthetic construct
  source 1..50: mol_type = other DNA
agatattgttaatcatttgctataaacaattttaaataaaaactatacgt

SEQ ID NO: 55346 - DNA, 50 bp, synthetic construct
  source 1..50: mol_type = other DNA
gagcgagaagttcctcaaagcgggatagagctttcgtattttattggctt

SEQ ID NO: 55347 - DNA, 50 bp, synthetic construct
  source 1..50: mol_type = other DNA
gatttgaagggaacggcccagcagggatgctggattattacaaaaaaata

SEQ ID NO: 55348 - DNA, 50 bp, synthetic construct
  source 1..50: mol_type = other DNA
gttatccttataaatataagattttaatatctttcttttgtaagcatatt

SEQ ID NO: 55349 - DNA, 50 bp, synthetic construct
  source 1..50: mol_type = other DNA
ctgtgcccatgataattggggagatatggattacatgatcatgtgggcag

SEQ ID NO: 55350 - DNA, 50 bp, synthetic construct
  source 1..50: mol_type = other DNA
acaagcaaaaaaaggaaaacacacccgtgctgttgcctttcaaagcgata

SEQ ID NO: 55351 - DNA, 50 bp, synthetic construct
  source 1..50: mol_type = other DNA
ttcaatcgcgctttgattgaacgtatacgccttcatggagcctatactct

SEQ ID NO: 55352 - DNA, 50 bp, synthetic construct
  source 1..50: mol_type = other DNA
tatgtatccgtaatcgtcgaggaagtttgctccgagcctgttcttacagc

SEQ ID NO: 55353 - DNA, 50 bp, synthetic construct
  source 1..50: mol_type = other DNA
ttttccatagtcgggccttcgactattttcgttgcaggaatgtatttaac

SEQ ID NO: 55354 - DNA, 50 bp, synthetic construct
  source 1..50: mol_type = other DNA
tgcgaacccttgttgaagttttgcagacattcgccaataacgagttcggt

SEQ ID NO: 55355 - DNA, 50 bp, synthetic construct
  source 1..50: mol_type = other DNA
aaccgtgtagccgagaatgcggtccggttcgttttctcatttcacgtatt

SEQ ID NO: 55356 - DNA, 50 bp, synthetic construct
  source 1..50: mol_type = other DNA
ctatgtgctggactcgaaccaacgtattttgacaggaatcatagctgatt

SEQ ID NO: 55357 - DNA, 50 bp, synthetic construct
  source 1..50: mol_type = other DNA
gagctataggcccgctttatgtcaatcgtttgaaatccctttgataggca

SEQ ID NO: 55358 - DNA, 50 bp, synthetic construct
  source 1..50: mol_type = other DNA
gcaggctatgcgcgtgtttcgacgggcgtgttcaagggcagcgcacctga

SEQ ID NO: 55359 - DNA, 50 bp, synthetic construct
  source 1..50: mol_type = other DNA
gcgtaatagctggctgccttttttctacctgtggcagcccgcgcttacgg

SEQ ID NO: 55360 - DNA, 50 bp, synthetic construct
  source 1..50: mol_type = other DNA
attctgtgttcattatgctgatacctgacattccaacaaatacacagcca

SEQ ID NO: 55361 - DNA, 50 bp, synthetic construct
  source 1..50: mol_type = other DNA
tttcttcttataataatgcgaccttaaggataacggaaaagaagaaaagc

SEQ ID NO: 55362 - DNA, 50 bp, synthetic construct
  source 1..50: mol_type = other DNA
ttttatttgttgagttcgtagtatttctactatggaacaaacaaataagc

SEQ ID NO: 55363 - DNA, 50 bp, synthetic construct
  source 1..50: mol_type = other DNA
tgacgccgcgcatggcaccgtcctccacgacgatgtgacgctcggcgtct

SEQ ID NO: 55364 - DNA, 50 bp, synthetic construct
  source 1..50: mol_type = other DNA
tggttacggatttggccatttcttttttccaaaagcaaactctgtagcca

SEQ ID NO: 55365 - DNA, 50 bp, synthetic construct
  source 1..50: mol_type = other DNA
tgccttggaacgtcgcttggacggcgccgagacagatggtaaaaaatttg

SEQ ID NO: 55366 - DNA, 50 bp, synthetic construct
  source 1..50: mol_type = other DNA
acaattatcaagtgtataagtccccggcaaaacgaatttttgataattta

SEQ ID NO: 55367 - DNA, 50 bp, synthetic construct
  source 1..50: mol_type = other DNA
tcctcaccgttcgcgtcttccgtgatcggtgccgccgtgaagcgtgacag

SEQ ID NO: 55368 - DNA, 50 bp, synthetic construct
  source 1..50: mol_type = other DNA
gttctctcaatcaccaagaatacgatttgccccttgtacaatgaaagaac

SEQ ID NO: 55369 - DNA, 50 bp, synthetic construct
  source 1..50: mol_type = other DNA
tttgctaatcttctatccaaaataagactattgcatatttcattgaaaat

SEQ ID NO: 55370 - DNA, 50 bp, synthetic construct
  source 1..50: mol_type = other DNA
caaagaaaaagttctccacgattgagccccgaataggggctttttctgtt

SEQ ID NO: 55371 - DNA, 50 bp, synthetic construct
  source 1..50: mol_type = other DNA
agagcaagattttatatatcctgcacatctatattatatcagattttaat

SEQ ID NO: 55372 - DNA, 50 bp, synthetic construct
  source 1..50: mol_type = other DNA
tttttattgtcaggggaattatccgctttttgcttatctgaaaataaatg

SEQ ID NO: 55373 - DNA, 50 bp, synthetic construct
  source 1..50: mol_type = other DNA
gaaaaaatatagctgaaaatgctttgaatttgtatcagggttctttttta

SEQ ID NO: 55374 - DNA, 50 bp, synthetic construct
  source 1..50: mol_type = other DNA
actgaaattgaataacgatcaaaattgggatatctacagcatatctcagt

SEQ ID NO: 55375 - DNA, 50 bp, synthetic construct
  source 1..50: mol_type = other DNA
agcatacgcagaggtatgaaccgtgttctgttcattcctttttcctcctt

SEQ ID NO: 55376 - DNA, 50 bp, synthetic construct
  source 1..50: mol_type = other DNA
agttttaacgcaaaaaatcaagttttgacttgattttgcaaggtggtatt

SEQ ID NO: 55377 - DNA, 50 bp, synthetic construct
  source 1..50: mol_type = other DNA
aatgccaaatgtgcaaatagcaataaatttctgttgttttgttctccatc

SEQ ID NO: 55378 - DNA, 50 bp, synthetic construct
  source 1..50: mol_type = other DNA
ttcgtctatgatgataagattgtcataactctcttaccgacgaagggaaa

SEQ ID NO: 55379 - DNA, 50 bp, synthetic construct
  source 1..50: mol_type = other DNA
gcatcgtatgcccgtcataatagcttgcaccgccaaacgggatacgaata

SEQ ID NO: 55380 - DNA, 50 bp, synthetic construct
  source 1..50: mol_type = other DNA
cccgaaatgcagtgcgtgatacaatcaagtagcatttctaaagactcgtc

SEQ ID NO: 55381 - DNA, 50 bp, synthetic construct
  source 1..50: mol_type = other DNA
ctttttttcttaaaaaataataaaattttgttattttataacaaatatat

SEQ ID NO: 55382 - DNA, 50 bp, synthetic construct
  source 1..50: mol_type = other DNA
cgatgtcaacgaagcgctctaaccagccttatacgtgtatgtattcatca

SEQ ID NO: 55383 - DNA, 50 bp, synthetic construct
  source 1..50: mol_type = other DNA
accgtaaccataccgtaaccgtaacctgacggcaaccgcatggtgaaatt

SEQ ID NO: 55384 - DNA, 50 bp, synthetic construct
  source 1..50: mol_type = other DNA
cagctgagcgcaatcgatgataagcggttatcaaggattacgaactgctt

SEQ ID NO: 55385 - DNA, 50 bp, synthetic construct
  source 1..50: mol_type = other DNA
cacaagctgctgcgcagaagtcacggtatgcttctgtttttcagcatttt

SEQ ID NO: 55386 - DNA, 50 bp, synthetic construct
  source 1..50: mol_type = other DNA
ttgagtaaattttgtacccaaacagttgtttccataaaaaataaacgaag

SEQ ID NO: 55387 - DNA, 50 bp, synthetic construct
  source 1..50: mol_type = other DNA
atcgcaatccgcttaggattggagctcgtagctcagctggatagagcgtt

SEQ ID NO: 55388 - DNA, 50 bp, synthetic construct
  source 1..50: mol_type = other DNA
taataaaggtacgtccacgcaataaacaccactttgacaagtaggtgtta

SEQ ID NO: 55389 - DNA, 50 bp, synthetic construct
  source 1..50: mol_type = other DNA
acaacttttgagcatatgtctaaaactttagcagtattaaccgaggttga

SEQ ID NO: 55390 - DNA, 50 bp, synthetic construct
  source 1..50: mol_type = other DNA
aatataacgttgataaaggtaaaaatgtttgcaattttcagactttaatt

SEQ ID NO: 55391 - DNA, 50 bp, synthetic construct
  source 1..50: mol_type = other DNA
gtgatttttcatcgtaaaggagagtgggaggtgagacgatgaggttcttt

SEQ ID NO: 55392 - DNA, 50 bp, synthetic construct
  source 1..50: mol_type = other DNA
gagcaggaatatgtgaaatgagaaaagagtcctctggtatctttaccccc

SEQ ID NO: 55393 - DNA, 50 bp, synthetic construct
  source 1..50: mol_type = other DNA
ttggcgtttttccataggttttcgtaagctaattcataaaaacacgctga

SEQ ID NO: 55394 - DNA, 50 bp, synthetic construct
  source 1..50: mol_type = other DNA
tctggacatcttcagccggtcggagctccgcatcggtcgatacgtcctga

SEQ ID NO: 55395 - DNA, 50 bp, synthetic construct
  source 1..50: mol_type = other DNA
tccttttttgggtacaaaaataacagatttctcaggttcccaatctggtg

SEQ ID NO: 55396 - DNA, 50 bp, synthetic construct
  source 1..50: mol_type = other DNA
tcctgctgccatcagtgatattttatcacatttccctggcacctgcatag

SEQ ID NO: 55397 - DNA, 50 bp, synthetic construct
  source 1..50: mol_type = other DNA
accatcatggcgagtcttgcacagcactgcccaagaagcgaggtgagttg

SEQ ID NO: 55398 - DNA, 50 bp, synthetic construct
  source 1..50: mol_type = other DNA
ctcaaaaaacagtccgtgaaaacccgaaagtacatgagttgagtttttcg

SEQ ID NO: 55399 - DNA, 50 bp, synthetic construct
  source 1..50: mol_type = other DNA
caggtgggccggatggggaactcggtgaggatgaccatccggcccagggc

SEQ ID NO: 55400 - DNA, 50 bp, synthetic construct
  source 1..50: mol_type = other DNA
ttgctttttccatatagataaaattaggtttgaaccatatataaaagcaa

SEQ ID NO: 55401 - DNA, 50 bp, synthetic construct
  source 1..50: mol_type = other DNA
ttttggaggattttttttccgaaccctttcggaaggaaaatctgacgaaa

SEQ ID NO: 55402 - DNA, 50 bp, synthetic construct
  source 1..50: mol_type = other DNA
ctcctgctgttcctgcaaggtactgattgtggaacgcggaaccgaccgag

SEQ ID NO: 55403 - DNA, 50 bp, synthetic construct
  source 1..50: mol_type = other DNA
ctgaacgggaaccggccaaaagccgatcaattactatttttcctcccgcc

SEQ ID NO: 55404 - DNA, 50 bp, synthetic construct
  source 1..50: mol_type = other DNA
tttatctttcttcctgtgccagtctcctcccccagcggaaacgatataat

SEQ ID NO: 55405 - DNA, 50 bp, synthetic construct
  source 1..50: mol_type = other DNA
gtttgaaaggatcatcaaacataatctgctgtttgatgcgctccagttcc

SEQ ID NO: 55406 - DNA, 50 bp, synthetic construct
  source 1..50: mol_type = other DNA
acacgaaaactcgttcattccgttatagccaaacaatgtcgttttcatgg

SEQ ID NO: 55407 - DNA, 50 bp, synthetic construct
  source 1..50: mol_type = other DNA
aaagtccataatctgtattaaacgagtgtctagtcactatcatgattgtg

SEQ ID NO: 55408 - DNA, 50 bp, synthetic construct
  source 1..50: mol_type = other DNA
gtttatcatgtgttatctaaacaagtttggttatacgtcaagtgataact

SEQ ID NO: 55409 - DNA, 50 bp, synthetic construct
  source 1..50: mol_type = other DNA
cagaatttttgctggtagaaattccggtcgtcttattgtaaaatatccaa

SEQ ID NO: 55410 - DNA, 50 bp, synthetic construct
  source 1..50: mol_type = other DNA
gttaaaaacaacaatattatgcaatttttaatttttttggatttttttat

SEQ ID NO: 55411 - DNA, 50 bp, synthetic construct
  source 1..50: mol_type = other DNA
ccggtgtgataacaatttttccgttgacagcaaaatcggcatcaaaacgg

SEQ ID NO: 55412 - DNA, 50 bp, synthetic construct
  source 1..50: mol_type = other DNA
gatattcggcttgtctcacgggattattccagtggagcctgcggaacatt

SEQ ID NO: 55413 - DNA, 50 bp, synthetic construct
  source 1..50: mol_type = other DNA
gctctgaaagccttatatatcaacggatttgaaaaatgggctgaaggagc

SEQ ID NO: 55414 - DNA, 50 bp, synthetic construct
  source 1..50: mol_type = other DNA
tctcatcctggaattttaacatggaatcatgtttcttggttttggtgaaa

SEQ ID NO: 55415 - DNA, 50 bp, synthetic construct
  source 1..50: mol_type = other DNA
atatgaaagataatttttgtataacatagtaaaaaagtgagctttaaagc

SEQ ID NO: 55416 - DNA, 50 bp, synthetic construct
  source 1..50: mol_type = other DNA
gtctcttccagattaaagataaggacacttgctattattggctttcagag

SEQ ID NO: 55417 - DNA, 50 bp, synthetic construct
  source 1..50: mol_type = other DNA
cctgaaatatctgttgatattgaatactcaatacaaacatacgtttaagg

SEQ ID NO: 55418 - DNA, 50 bp, synthetic construct
  source 1..50: mol_type = other DNA
ctcctcagtccccgagattgacggcatttacaatcttatatccatagggt

SEQ ID NO: 55419 - DNA, 50 bp, synthetic construct
  source 1..50: mol_type = other DNA
tatcataatcaattctttctatgcaagcacagaaagaattcgctaaaaat

SEQ ID NO: 55420 - DNA, 50 bp, synthetic construct
  source 1..50: mol_type = other DNA
cgcagaaataggtcgaaaaagtttctaaactaaatttttcgctatctgca

SEQ ID NO: 55421 - DNA, 50 bp, synthetic construct
  source 1..50: mol_type = other DNA
acgcctaaaattccgcaggtgtaaaatcatctgtttcattttgtaggtcc

SEQ ID NO: 55422 - DNA, 50 bp, synthetic construct
  source 1..50: mol_type = other DNA
ccgcctttgcacggcgtttacgcggacgcctgaaatgaaagaaaaggcac

SEQ ID NO: 55423 - DNA, 50 bp, synthetic construct
  source 1..50: mol_type = other DNA
gctccgcgatttttaaccgctatatttaaaacaattcaaattcaagaagg

SEQ ID NO: 55424 - DNA, 50 bp, synthetic construct
  source 1..50: mol_type = other DNA
aaaataatcaatactgaaaaacctaatattgtatcaaaattgatagtatt

SEQ ID NO: 55425 - DNA, 50 bp, synthetic construct
  source 1..50: mol_type = other DNA
aatgcaacttgcattaattgacaaatatgataatcaatgcattactcatc

SEQ ID NO: 55426 - DNA, 50 bp, synthetic construct
  source 1..50: mol_type = other DNA
agttacataactgtgcaagtgatttccatcatagatagtattagctataa

SEQ ID NO: 55427 - DNA, 50 bp, synthetic construct
  source 1..50: mol_type = other DNA
caagcgccggacgggaacggcaaaatttacaattacccgctatacaggcc

SEQ ID NO: 55428 - DNA, 50 bp, synthetic construct
  source 1..50: mol_type = other DNA
tgggtatgattatcttattggtatggataccgctaatatacggaacctta

SEQ ID NO: 55429 - DNA, 50 bp, synthetic construct
  source 1..50: mol_type = other DNA
ggccaagcgcctgccgggcatcctgccggacgacgcgctggcgctgtgct

SEQ ID NO: 55430 - DNA, 50 bp, synthetic construct
  source 1..50: mol_type = other DNA
ttatttctacttcctatattcgtcggaacgattataggaaagggaaatca

SEQ ID NO: 55431 - DNA, 50 bp, synthetic construct
  source 1..50: mol_type = other DNA
gcagacataactacttaacaccttttaatttgttttcgctttaggttgaa

SEQ ID NO: 55432 - DNA, 50 bp, synthetic construct
  source 1..50: mol_type = other DNA
ctgcgctacacccggatatcgtcctcttccacgaacagggtgtcgaacac

SEQ ID NO: 55433 - DNA, 50 bp, synthetic construct
  source 1..50: mol_type = other DNA
tcattcacgataacagtaatggtctggattgtgattgtagtactgattgg

SEQ ID NO: 55434 - DNA, 50 bp, synthetic construct
  source 1..50: mol_type = other DNA
caattacaccaagctgtcttaatatatccgaagcaatattaaaagcattg

SEQ ID NO: 55435 - DNA, 50 bp, synthetic construct
  source 1..50: mol_type = other DNA
gcggggccttgtgccccgcggtgaaaaacccaatgttttcaaggcttctg

SEQ ID NO: 55436 - DNA, 50 bp, synthetic construct
  source 1..50: mol_type = other DNA
ggcactttttactccaattctttttctggtggattggctaaaagcctgtc

SEQ ID NO: 55437 - DNA, 50 bp, synthetic construct
  source 1..50: mol_type = other DNA
cattcttatcatcctttctctgaatatcagtaaaactgttaatctcaaac

SEQ ID NO: 55438 - DNA, 50 bp, synthetic construct
  source 1..50: mol_type = other DNA
taacaattttcacttaaaaaatcttctgatttttaaagaaaaaattaatc

SEQ ID NO: 55439 - DNA, 50 bp, synthetic construct
  source 1..50: mol_type = other DNA
agaagcttatggagctgagtttgtcgagaaatagcgccgttattgcttga

SEQ ID NO: 55440 - DNA, 50 bp, synthetic construct
  source 1..50: mol_type = other DNA
ccatgtatgtgtggagccataaaaatttgtcgtcctcctatgccactttt

SEQ ID NO: 55441 - DNA, 50 bp, synthetic construct
  source 1..50: mol_type = other DNA
aaacaggatccagaattgttccggataaagaataaaaacagctcctgacg

SEQ ID NO: 55442 - DNA, 50 bp, synthetic construct
  source 1..50: mol_type = other DNA
cgttgtgtcggcaggcatgggcgcgcggtttgctggacggggacaagtat

SEQ ID NO: 55443 - DNA, 50 bp, synthetic construct
  source 1..50: mol_type = other DNA
agtaatatcaaactcacgtaaaaatgattttatatgctttatatctgagt

SEQ ID NO: 55444 - DNA, 50 bp, synthetic construct
  source 1..50: mol_type = other DNA
atgttgtcctgggcgagttcctcctgggcggcactgaataaatacatgcc

SEQ ID NO: 55445 - DNA, 50 bp, synthetic construct
  source 1..50: mol_type = other DNA
aagaaggattactccatcaaatgtctttattggggacattattttcggaa

SEQ ID NO: 55446 - DNA, 50 bp, synthetic construct
  source 1..50: mol_type = other DNA
tatatatcttgatagctctcgcacatgagcgaggtcatgaaagcgaaatg

SEQ ID NO: 55447 - DNA, 50 bp, synthetic construct
  source 1..50: mol_type = other DNA
ttcaattgtatcgatatcacattctacgaactgatatcgtaatactcatt

SEQ ID NO: 55448 - DNA, 50 bp, synthetic construct
  source 1..50: mol_type = other DNA
cttataggaatggacttaaatgtaaattattttgataaccacaacataat

SEQ ID NO: 55449 - DNA, 50 bp, synthetic construct
  source 1..50: mol_type = other DNA
gtacacaccgtttttccaagtcccatgcgatatccgtaaggtgtgtgtcc

SEQ ID NO: 55450 - DNA, 50 bp, synthetic construct
  source 1..50: mol_type = other DNA
ctccgatatattaagatatttgtttaataaagtatgtcttacatccggaa

SEQ ID NO: 55451 - DNA, 50 bp, synthetic construct
  source 1..50: mol_type = other DNA
ggatataagatgcagcacacaccatattgtatttgatgtcaagtataagg

SEQ ID NO: 55452 - DNA, 50 bp, synthetic construct
  source 1..50: mol_type = other DNA
tttcgtcagattttccttccgaaagggttcggaaaaaaaatcctccaaaa

SEQ ID NO: 55453 - DNA, 50 bp, synthetic construct
  source 1..50: mol_type = other DNA
tgccggagagaaagattcccggtttaacccttgtatctaggtcatcgcta

SEQ ID NO: 55454 - DNA, 50 bp, synthetic construct
  source 1..50: mol_type = other DNA
ctgcataaatggatcttcatattgttatttattaatatccatttaggttt

SEQ ID NO: 55455 - DNA, 50 bp, synthetic construct
  source 1..50: mol_type = other DNA
ccttgtatttgctaaaatcaatcacactataatctcttacaaattgtgcc

SEQ ID NO: 55456 - DNA, 50 bp, synthetic construct
  source 1..50: mol_type = other DNA
tccagccgggcttgttgcccggagcgcaccgggagcgtgaggggggcgga

SEQ ID NO: 55457 - DNA, 50 bp, synthetic construct
  source 1..50: mol_type = other DNA
tgggcgcataggcagaatcatcaatctgcggcatggtgcgtactactctt

SEQ ID NO: 55458 - DNA, 50 bp, synthetic construct
  source 1..50: mol_type = other DNA
ttatttttcgggcttttcgccgttttcctatggaatatcccgaaaaagga

SEQ ID NO: 55459 - DNA, 50 bp, synthetic construct
  source 1..50: mol_type = other DNA
agggaaaattgaacatttgtcgcttttgaggatattgttaagcggtatgc

SEQ ID NO: 55460 - DNA, 50 bp, synthetic construct
  source 1..50: mol_type = other DNA
tgcaggtgattccggcaacgaagcggggctggcaaacggtatcacgacca

SEQ ID NO: 55461 - DNA, 50 bp, synthetic construct
  source 1..50: mol_type = other DNA
tgagggagaatttctgtccgataattgtatcaaacagagtgatatatagt

SEQ ID NO: 55462 - DNA, 50 bp, synthetic construct
  source 1..50: mol_type = other DNA
ccgtctcctgcggaatggtgcagtatcctcggactttccgcaggactgtc

SEQ ID NO: 55463 - DNA, 50 bp, synthetic construct
  source 1..50: mol_type = other DNA
agaatcaggtcaattattacacaaatccgtgtaaacgttgaaaaatcaat

SEQ ID NO: 55464 - DNA, 50 bp, synthetic construct
  source 1..50: mol_type = other DNA
caaagccatttgagcgaaaaatagtgtacatttttattcaaaaacttagc

SEQ ID NO: 55465 - DNA, 50 bp, synthetic construct
  source 1..50: mol_type = other DNA
ttctattagatggggagcggggggacgcccccgctattttgggagcgttt

SEQ ID NO: 55466 - DNA, 50 bp, synthetic construct
  source 1..50: mol_type = other DNA
gtatttttcgaaataagccagtgcatacaatgtcttattttatctacgcc

SEQ ID NO: 55467 - DNA, 50 bp, synthetic construct
  source 1..50: mol_type = other DNA
atattgattgtactaacaaagcagtagtgcatagttagtacgacaaagat

SEQ ID NO: 55468 - DNA, 50 bp, synthetic construct
  source 1..50: mol_type = other DNA
tggtacatacatttggctcaaccggaacattcatccaaatagaatgagtt

SEQ ID NO: 55469 - DNA, 50 bp, synthetic construct
  source 1..50: mol_type = other DNA
tctctcttagggtagtgctatattcgctctgagcacaataaaaagcgaat

SEQ ID NO: 55470 - DNA, 50 bp, synthetic construct
  source 1..50: mol_type = other DNA
caccctttggatatagaattgaagatcttcaacttgaataacaagaatag

SEQ ID NO: 55471 - DNA, 50 bp, synthetic construct
  source 1..50: mol_type = other DNA
tcgcttcactcgtccagtccatatcaccatctcttaagagagtgaaacga

SEQ ID NO: 55472 - DNA, 50 bp, synthetic construct
  source 1..50: mol_type = other DNA
gaaagggcctaaaatgaaaatggcaccgcctttggattctccgccgtcat

SEQ ID NO: 55473 - DNA, 50 bp, synthetic construct
  source 1..50: mol_type = other DNA
agattgtgcgtgactttttaatccgcagaaataaaaaagctgtcccgtgc

SEQ ID NO: 55474 - DNA, 50 bp, synthetic construct
  source 1..50: mol_type = other DNA
cgccgattatatcctctccggcaaaccgcccggaaaggaagtgttatcat

SEQ ID NO: 55475 - DNA, 50 bp, synthetic construct
  source 1..50: mol_type = other DNA
gattttggggagtctgagtgtgccaatccacactatcctccccgtgtttt

SEQ ID NO: 55476 - DNA, 50 bp, synthetic construct
  source 1..50: mol_type = other DNA
tttcccgatggcatcggcatcaacagcgcgaggccgaagccgagaaaaaa

SEQ ID NO: 55477 - DNA, 50 bp, synthetic construct
  source 1..50: mol_type = other DNA
ttaatgttagcggacgagtgcttgaccaattacttgtctttatatatgaa

SEQ ID NO: 55478 - DNA, 50 bp, synthetic construct
  source 1..50: mol_type = other DNA
gttctggcggcaacaggatgcctgatcaagtcggcacttcgtatgagacc

SEQ ID NO: 55479 - DNA, 50 bp, synthetic construct
  source 1..50: mol_type = other DNA
acgcaggtaaaggcagtaagccaaaataatggtacttgattttatagaaa

SEQ ID NO: 55480 - DNA, 50 bp, synthetic construct
  source 1..50: mol_type = other DNA
gtataaaaataacagccagcggggaaccgtgcctgcgcggatctttacgg

SEQ ID NO: 55481 - DNA, 50 bp, synthetic construct
  source 1..50: mol_type = other DNA
cttcctgttccatgttctgtacctcgactacgagaaacaggaagcaaaac

SEQ ID NO: 55482 - DNA, 50 bp, synthetic construct
  source 1..50: mol_type = other DNA
gggtggcagcctactgccgtgtgtcaacacagatcattgacctggcatcc

SEQ ID NO: 55483 - DNA, 50 bp, synthetic construct
  source 1..50: mol_type = other DNA
taaaggtgataaaaattatcaaagaaaatggaggttttttattatggata

SEQ ID NO: 55484 - DNA, 50 bp, synthetic construct
  source 1..50: mol_type = other DNA
ctttatgatggtgtccggaaccctggtattttccttacaccaacactcct

SEQ ID NO: 55485 - DNA, 50 bp, synthetic construct
  source 1..50: mol_type = other DNA
caagccatacctccttccgttttggtagaaaatgaacagcgtgttgcagt

SEQ ID NO: 55486 - DNA, 50 bp, synthetic construct
  source 1..50: mol_type = other DNA
tttcttattttccggcatcattcaatttgctcatttcgcatcattgtaaa

SEQ ID NO: 55487 - DNA, 50 bp, synthetic construct
  source 1..50: mol_type = other DNA
ttgaaatttttgctttcaagtgtaaaatcgtcagaaatgaaaaaactctg

SEQ ID NO: 55488 - DNA, 50 bp, synthetic construct
  source 1..50: mol_type = other DNA
cgggacgcggcgctcgattgtgaccgatgtgttgcagagcgaagagcccg

SEQ ID NO: 55489 - DNA, 50 bp, synthetic construct
  source 1..50: mol_type = other DNA
gcgcgggcgacgacgccccgaagtcgctccctgagcgccgtcgccaaggc

SEQ ID NO: 55490 - DNA, 50 bp, synthetic construct
  source 1..50: mol_type = other DNA
cctgtagaatccatccgcgattaccggcgcctccggatatcttcctcaat

SEQ ID NO: 55491 - DNA, 50 bp, synthetic construct
  source 1..50: mol_type = other DNA
tactctgccagtttttcacactccatgtagtgaaaaaaggaggccatttt

SEQ ID NO: 55492 - DNA, 50 bp, synthetic construct
  source 1..50: mol_type = other DNA
ttattgccaatccgttgttccatatttgaggcagcttcacttggcaatct

SEQ ID NO: 55493 - DNA, 50 bp, synthetic construct
  source 1..50: mol_type = other DNA
ataggatcttcaaggatcagaatcagaggtcagtcccttgaatctccttc

SEQ ID NO: 55494 - DNA, 50 bp, synthetic construct
  source 1..50: mol_type = other DNA
tgctgcaacttggtattgctctcacttttcgttgaatgagggttgctgcg

SEQ ID NO: 55495 - DNA, 50 bp, synthetic construct
  source 1..50: mol_type = other DNA
tcttttattttcctgtaaagtgccaaaccacctcatgaaacaatagaagc

SEQ ID NO: 55496 - DNA, 50 bp, synthetic construct
  source 1..50: mol_type = other DNA
tatcttttaatttcattaatgtcaggtgacaggaatgaacagtgttaatc

SEQ ID NO: 55497 - DNA, 50 bp, synthetic construct
  source 1..50: mol_type = other DNA
gtcaacttgttgaacatatgctcccgcccctccctggagaatcgggaaat

SEQ ID NO: 55498 - DNA, 50 bp, synthetic construct
  source 1..50: mol_type = other DNA
gcgtgaagtccatccgcgatgtgcagtcgaatcgcacaccgacgaagagc

SEQ ID NO: 55499 - DNA, 50 bp, synthetic construct
  source 1..50: mol_type = other DNA
cggcccgtcgcgatgatagcggcagcgtccgcattaagctagagggaccg

SEQ ID NO: 55500 - DNA, 50 bp, synthetic construct
  source 1..50: mol_type = other DNA
ctggaggtggccgtcccagacgtgcgcccgtcgaggacgccgggcgccgg

SEQ ID NO: 55501 - DNA, 50 bp, synthetic construct
  source 1..50: mol_type = other DNA
cgttgtcagtgttattgataacattgatggaattttcaaaattgacaaga

SEQ ID NO: 55502 - DNA, 50 bp, synthetic construct
  source 1..50: mol_type = other DNA
gtcaatatatattagaaaagaggagctctataatttccataaaataacga

SEQ ID NO: 55503 - DNA, 50 bp, synthetic construct
  source 1..50: mol_type = other DNA
atagcattttcgaagtaaatgttcctgaattttttcttctattataatat

SEQ ID NO: 55504 - DNA, 50 bp, synthetic construct
  source 1..50: mol_type = other DNA
ttcaaaaaattttatattcttttatatcaaatactctaaaatctttcgtt

SEQ ID NO: 55505 - DNA, 50 bp, synthetic construct
  source 1..50: mol_type = other DNA
tttttaggagacatttttattagtgaccgcataaaaaataattcaaaaaa

SEQ ID NO: 55506 - DNA, 50 bp, synthetic construct
  source 1..50: mol_type = other DNA
atatataagataaaattataaataattcctttcttatttgtatgattgct

SEQ ID NO: 55507 - DNA, 50 bp, synthetic construct
  source 1..50: mol_type = other DNA
ccgggtgcttcctgggcgaagaccaccgctcacgctccgaaagctggaca

SEQ ID NO: 55508 - DNA, 50 bp, synthetic construct
  source 1..50: mol_type = other DNA
aatgtgattctcaataaaaacggatgtccgtccttacacgaaacgcaata

SEQ ID NO: 55509 - DNA, 50 bp, synthetic construct
  source 1..50: mol_type = other DNA
aatgaaccgattgatctcgattataaataccttcctgttttcgttcaatt

SEQ ID NO: 55510 - DNA, 50 bp, synthetic construct
  source 1..50: mol_type = other DNA
gcataaacttttaactaaaacaaatcttctaacgcatcaacagcttctgt

SEQ ID NO: 55511 - DNA, 50 bp, synthetic construct
  source 1..50: mol_type = other DNA
acgttatatgtgcgagcgatgtttttaaatgaaaaccgccgtaatatacg

SEQ ID NO: 55512 - DNA, 50 bp, synthetic construct
  source 1..50: mol_type = other DNA
gaagaaaaagaggcttcttcccatgaatcaactaaagcatattcattata

SEQ ID NO: 55513 - DNA, 50 bp, synthetic construct
  source 1..50: mol_type = other DNA
actgcaacacgctgttcattttctaccaaaacggaaggaggtaaggcttg

SEQ ID NO: 55514 - DNA, 50 bp, synthetic construct
  source 1..50: mol_type = other DNA
tcgctggcggccttccgctcttcctcatctttgcggatttcacggattgt

SEQ ID NO: 55515 - DNA, 50 bp, synthetic construct
  source 1..50: mol_type = other DNA
acatgttcgctctgttttccgcatatatgctggccagttttcccggatca

SEQ ID NO: 55516 - DNA, 50 bp, synthetic construct
  source 1..50: mol_type = other DNA
cataatatttctggcaaatcgggaaaggagcagcctatggaaattcaagt

SEQ ID NO: 55517 - DNA, 50 bp, synthetic construct
  source 1..50: mol_type = other DNA
ggaaaaccctcgcccaaaggcgggggtgagcttcttggcggtcagggacc

SEQ ID NO: 55518 - DNA, 50 bp, synthetic construct
  source 1..50: mol_type = other DNA
tctttgagatatcacgagcatacataacctgtgagctgataggctcaaga

SEQ ID NO: 55519 - DNA, 50 bp, synthetic construct
  source 1..50: mol_type = other DNA
attatgccaacagaagataagttcgtgtagtatatttcgctttgaatcgc

SEQ ID NO: 55520 - DNA, 50 bp, synthetic construct
  source 1..50: mol_type = other DNA
cccagaatagagtaaagcccacaggtctgtaaatgttgctctattgagcg

SEQ ID NO: 55521 - DNA, 50 bp, synthetic construct
  source 1..50: mol_type = other DNA
tatttataaaacggtcagtcttatgataaagactgaccgttttataatct

SEQ ID NO: 55522 - DNA, 50 bp, synthetic construct
  source 1..50: mol_type = other DNA
cggcaccataccgccgttgtacttgcactggcaaagcggctggctgcaga

SEQ ID NO: 55523 - DNA, 50 bp, synthetic construct
  source 1..50: mol_type = other DNA
gttgcacctccttggcagcgtgttcgagcgcaccgtcaagaaggtgctgg

SEQ ID NO: 55524 - DNA, 50 bp, synthetic construct
  source 1..50: mol_type = other DNA
cctgcaacaactcggttaacagccgacgacgtgcgtcgggtcgttccagc

SEQ ID NO: 55525 - DNA, 50 bp, synthetic construct
  source 1..50: mol_type = other DNA
gtggccgggtacgctcgtgtctccacgacatgtcgccggtcggcaggtgc

SEQ ID NO: 55526 - DNA, 50 bp, synthetic construct
  source 1..50: mol_type = other DNA
gacgattacattccgcttctatgacgtcatacaaaagatatggcaggatc

SEQ ID NO: 55527 - DNA, 50 bp, synthetic construct
  source 1..50: mol_type = other DNA
agtccgcatacaagggagagaaagatctttttcacggtgctatgcgggaa

SEQ ID NO: 55528 - DNA, 50 bp, synthetic construct
  source 1..50: mol_type = other DNA
tcagaacgtgacggattttcccaatggcttgaaaaacgtacactgggcga

SEQ ID NO: 55529 - DNA, 50 bp, synthetic construct
  source 1..50: mol_type = other DNA
gagtgtattgctccgccggcgttgtgaaacacgggcgtaacctgctactt

SEQ ID NO: 55530 - DNA, 50 bp, synthetic construct
  source 1..50: mol_type = other DNA
tagaatgtcggccccattaaaagagctcttttaatccacactatcctccc

SEQ ID NO: 55531 - DNA, 50 bp, synthetic construct
  source 1..50: mol_type = other DNA
ctgcacgcacttcctttctgtatttcctctgaaaaatcaagtcttaggag

SEQ ID NO: 55532 - DNA, 50 bp, synthetic construct
  source 1..50: mol_type = other DNA
tcgattgtatccacttttgtgggcaagcccggtgcgatggcgagattgaa

SEQ ID NO: 55533 - DNA, 50 bp, synthetic construct
  source 1..50: mol_type = other DNA
ccgactttttgttcgttttcgttcatccaagaaaacacttgctattattg

SEQ ID NO: 55534 - DNA, 50 bp, synthetic construct
  source 1..50: mol_type = other DNA
cttggcttcctcttcattgataacaaaagatgcctgtgatggaaccaggg

SEQ ID NO: 55535 - DNA, 50 bp, synthetic construct
  source 1..50: mol_type = other DNA
atcaaaagcaattacgcatcaaagttttgccctgtaaattttctatgaac

SEQ ID NO: 55536 - DNA, 50 bp, synthetic construct
  source 1..50: mol_type = other DNA
tgacatattcccgtagaaaccgttatcaccttttcttctggaataagcga

SEQ ID NO: 55537 - DNA, 50 bp, synthetic construct
  source 1..50: mol_type = other DNA
aaatatcctgaagaatgaaaaatacttattaccgattaagagtgatatat

SEQ ID NO: 55538 - DNA, 50 bp, synthetic construct
  source 1..50: mol_type = other DNA
ggttcagcctgacggcaagatcctatagttgggagtttgaaggaacaatt

SEQ ID NO: 55539 - DNA, 50 bp, synthetic construct
  source 1..50: mol_type = other DNA
gtacattcctttcggctatcagattcaaaagttacctgtctggaatgagc

SEQ ID NO: 55540 - DNA, 50 bp, synthetic construct
  source 1..50: mol_type = other DNA
gacagggcataaggcggtacaggaaagtttctaccaacttttgtgctgtt

SEQ ID NO: 55541 - DNA, 50 bp, synthetic construct
  source 1..50: mol_type = other DNA
ttatcctgataatcaaacatatagagctatattcttgattccgatgataa

SEQ ID NO: 55542 - DNA, 50 bp, synthetic construct
  source 1..50: mol_type = other DNA
gtcgattccatcagagcttcccttgcaggcagtatcgatattgaactcac

SEQ ID NO: 55543 - DNA, 50 bp, synthetic construct
  source 1..50: mol_type = other DNA
ggatggcctggccgagctgttctattccacaccgcccgccccggccacaa

SEQ ID NO: 55544 - DNA, 50 bp, synthetic construct
  source 1..50: mol_type = other DNA
tcatttgccattgaaccacctcactataacggaggtttacctatgaatga

SEQ ID NO: 55545 - DNA, 50 bp, synthetic construct
  source 1..50: mol_type = other DNA
agtttgttgcaagccgttgcaagttcttgttgaacggattgccccggctg

SEQ ID NO: 55546 - DNA, 50 bp, synthetic construct
  source 1..50: mol_type = other DNA
aaaacattgcatttttaaagttgatttcaatagtaaaaaataaattattt

SEQ ID NO: 55547 - DNA, 50 bp, synthetic construct
  source 1..50: mol_type = other DNA
gattttcaatgccgtatgcggagctcgcaaagcttgagccgttgaaaatc

SEQ ID NO: 55548 - DNA, 50 bp, synthetic construct
  source 1..50: mol_type = other DNA
accgtttgccgagcatatcctgcggtaacaacgtatgatcggctttcata

SEQ ID NO: 55549 - DNA, 50 bp, synthetic construct
  source 1..50: mol_type = other DNA
ttccagaaaaagagtttttaatattacgattaaaaataatcaaaaaggaa

SEQ ID NO: 55550 - DNA, 50 bp, synthetic construct
  source 1..50: mol_type = other DNA
tattttatagtaatggggaacatgctcatgttgtagtatatcatttatat

SEQ ID NO: 55551 - DNA, 50 bp, synthetic construct
  source 1..50: mol_type = other DNA
ttagtatacttgattcagggtgttttcgtaaccgtcgacggttagactaa

SEQ ID NO: 55552 - DNA, 50 bp, synthetic construct
  source 1..50: mol_type = other DNA
gataggcacagggcattataatattgtagtcaaaatgtagtcagcctaac

SEQ ID NO: 55553 - DNA, 50 bp, synthetic construct
  source 1..50: mol_type = other DNA
ataagtcaagctgcccgttctgcgacggacgaagatgaagtggcagaggc

SEQ ID NO: 55554 - DNA, 50 bp, synthetic construct
  source 1..50: mol_type = other DNA
atacaacgtcaccaactgcaaattcccacatgcgtcaggttacgtctaac

SEQ ID NO: 55555 - DNA, 50 bp, synthetic construct
  source 1..50: mol_type = other DNA
catacgtcaggaagaacatccacgtccgtggatttttggtcggacgttcc

SEQ ID NO: 55556 - DNA, 50 bp, synthetic construct
  source 1..50: mol_type = other DNA
catttctaccaattatcctgttcttcattgtacgggtacaggtagaaatt

SEQ ID NO: 55557 - DNA, 50 bp, synthetic construct
  source 1..50: mol_type = other DNA
caactccattcaaaaaaaggtataaaaatattgtcctgccggtggagctg

SEQ ID NO: 55558 - DNA, 50 bp, synthetic construct
  source 1..50: mol_type = other DNA
acatagcatcttcctcctttagtgttcacggtgggccgaagatggtattt

SEQ ID NO: 55559 - DNA, 50 bp, synthetic construct
  source 1..50: mol_type = other DNA
gcttttatttaacccattttttatgaattcagggtgttatagataaaatg

SEQ ID NO: 55560 - DNA, 50 bp, synthetic construct
  source 1..50: mol_type = other DNA
ttccaaagctctttattgtgatcggttaattgatatatggaggcccggac

SEQ ID NO: 55561 - DNA, 50 bp, synthetic construct
  source 1..50: mol_type = other DNA
ggctcctttcaatagctatgattgtacaaggctgccaatgggggccagcc

SEQ ID NO: 55562 - DNA, 50 bp, synthetic construct
  source 1..50: mol_type = other DNA
ttctacgaatccctgaaaagcgggtgcgtacttttagcagattatgaaag

SEQ ID NO: 55563 - DNA, 50 bp, synthetic construct
  source 1..50: mol_type = other DNA
ggatatattccggatcaccaagcatattattggctttcagagtgatatat

SEQ ID NO: 55564 - DNA, 50 bp, synthetic construct
  source 1..50: mol_type = other DNA
aacggctaaatggttttgcaaagcaagaaatgcaacttgatttaatcgga

SEQ ID NO: 55565 - DNA, 50 bp, synthetic construct
  source 1..50: mol_type = other DNA
ctttcgagtaatcgtctcatttaacccgcagagagacgaccggcagcgtg

SEQ ID NO: 55566 - DNA, 50 bp, synthetic construct
  source 1..50: mol_type = other DNA
ttcggtttttccccatccggagctatagtaccggaaaggagctgatttca

SEQ ID NO: 55567 - DNA, 50 bp, synthetic construct
  source 1..50: mol_type = other DNA
ttgaatttttgtaactatttatgtaccttcaaacagttctgtatattcaa

SEQ ID NO: 55568 - DNA, 50 bp, synthetic construct
  source 1..50: mol_type = other DNA
atgctttattaaaaaaagtaaagttctttctatccttttttatctgatat

SEQ ID NO: 55569 - DNA, 50 bp, synthetic construct
  source 1..50: mol_type = other DNA
gacatccacaagtaaatacagtttataaaaaagactgattttagggggtt

SEQ ID NO: 55570 - DNA, 50 bp, synthetic construct
  source 1..50: mol_type = other DNA
aatgatactttagaataaccacttggaagtgttatttttatgagtatatt

SEQ ID NO: 55571 - DNA, 50 bp, synthetic construct
  source 1..50: mol_type = other DNA
cagataatagtctttacctctcgcaagttaggtgtaaatcctaaagaagt

SEQ ID NO: 55572 - DNA, 50 bp, synthetic construct
  source 1..50: mol_type = other DNA
gataactgctctttgcataaaatcaatattttccgtgatgagctgtttgc

SEQ ID NO: 55573 - DNA, 50 bp, synthetic construct
  source 1..50: mol_type = other DNA
atcttagtgattatggggagagcgtaccctaagaaatatacctctaagcg

SEQ ID NO: 55574 - DNA, 50 bp, synthetic construct
  source 1..50: mol_type = other DNA
attttggattgatggatcaaccggagaaagatgaaaggtctggcagaaaa

SEQ ID NO: 55575 - DNA, 50 bp, synthetic construct
  source 1..50: mol_type = other DNA
atatattgagctgttttgcttcttcgcagatcgtggacagacaggtgcag

SEQ ID NO: 55576 - DNA, 50 bp, synthetic construct
  source 1..50: mol_type = other DNA
aacattcctatgatatactatttcgattcacggtatcattatatcatgaa

SEQ ID NO: 55577 - DNA, 50 bp, synthetic construct
  source 1..50: mol_type = other DNA
aatttttttaatacttttcataaattcttttgaagaagatcactaaaatc

SEQ ID NO: 55578 - DNA, 50 bp, synthetic construct
  source 1..50: mol_type = other DNA
aggcccctgtaataattttcctttataatgaaaaaagttatgatcatccc

SEQ ID NO: 55579 - DNA, 50 bp, synthetic construct
  source 1..50: mol_type = other DNA
ataggccccgttctgaacggggctgcagatccttcttgcacgctggcagg

SEQ ID NO: 55580 - DNA, 50 bp, synthetic construct
  source 1..50: mol_type = other DNA
aaattctgccactcctttctctttggaaaacgaacagcgtgttgccgtat

SEQ ID NO: 55581 - DNA, 50 bp, synthetic construct
  source 1..50: mol_type = other DNA
tgtctcatagaaaatctatcataatattataatatgtagaaattgtgtca

SEQ ID NO: 55582 - DNA, 50 bp, synthetic construct
  source 1..50: mol_type = other DNA
acaagcccgaccgcgcggcgcaggggcctgcgctccggcgcgggtctttt

SEQ ID NO: 55583 - DNA, 50 bp, synthetic construct
  source 1..50: mol_type = other DNA
tgacaaaacatcaagctgatcaacatcggaaaacgcttgatattccggcc

SEQ ID NO: 55584 - DNA, 50 bp, synthetic construct
  source 1..50: mol_type = other DNA
aatcattttttcttttctttccacataaggagcgaaaagaaatggccaaa

SEQ ID NO: 55585 - DNA, 50 bp, synthetic construct
  source 1..50: mol_type = other DNA
tattatcaatcgtaaccatttctacagggaaatgtatagagttacgcttt

SEQ ID NO: 55586 - DNA, 50 bp, synthetic construct
  source 1..50: mol_type = other DNA
gagcaagagaaaaatatcagcaatttcttgctgatgaacctacaggcggt

SEQ ID NO: 55587 - DNA, 50 bp, synthetic construct
  source 1..50: mol_type = other DNA
atcaccaaagctgaaaaacctgtatctatagggcttttcttttttgtatg

SEQ ID NO: 55588 - DNA, 50 bp, synthetic construct
  source 1..50: mol_type = other DNA
cataatcacagccctcctcattttttatcctgaggctggatgtatttatg

SEQ ID NO: 55589 - DNA, 50 bp, synthetic construct
  source 1..50: mol_type = other DNA
gaaccgccgcatatccttgtagacaggcgaacgaggaatgaaagcggtga

SEQ ID NO: 55590 - DNA, 50 bp, synthetic construct
  source 1..50: mol_type = other DNA
gactgcctcgaagttgtcgagctgatgcgccggatcagcatcgggatgtg

SEQ ID NO: 55591 - DNA, 50 bp, synthetic construct
  source 1..50: mol_type = other DNA
ttcctctccctttcaaaaaatccggtacctattttatcaaatttgaggta

SEQ ID NO: 55592 - DNA, 50 bp, synthetic construct
  source 1..50: mol_type = other DNA
agtgtatatctactatgtatgccgcacgtatccccgtagagatatacgca

SEQ ID NO: 55593 - DNA, 50 bp, synthetic construct
  source 1..50: mol_type = other DNA
tttggaaaatgtaagcgatacgccagcgcgtagaggaatgttgcgaaaac

SEQ ID NO: 55594 - DNA, 50 bp, synthetic construct
  source 1..50: mol_type = other DNA
aggcacgccgtatgataagcaacaagaagaagttatagggattttagccc

SEQ ID NO: 55595 - DNA, 50 bp, synthetic construct
  source 1..50: mol_type = other DNA
cagatcagcgccctgttcgtcacgatcgtcacgcagcatccgctacaatg

SEQ ID NO: 55596 - DNA, 50 bp, synthetic construct
  source 1..50: mol_type = other DNA
caacattcccgccgcgccacgccgattttcggaataaggttgtccagcta

SEQ ID NO: 55597 - DNA, 50 bp, synthetic construct
  source 1..50: mol_type = other DNA
aatatttattaaaaaattttatatataaataattaaaccgtataaaaatg

SEQ ID NO: 55598 - DNA, 50 bp, synthetic construct
  source 1..50: mol_type = other DNA
gtttctcctttcactgtgtccgaatcaacggacacgccgaaagctccagc

SEQ ID NO: 55599 - DNA, 50 bp, synthetic construct
  source 1..50: mol_type = other DNA
tgttgtactaaatataacgcacctacaggagcgtatgagatagtacaaca

SEQ ID NO: 55600 - DNA, 50 bp, synthetic construct
  source 1..50: mol_type = other DNA
aagaaaaaagctcttctcacatacattctctgccgtaatccttttttcct

SEQ ID NO: 55601 - DNA, 50 bp, synthetic construct
  source 1..50: mol_type = other DNA
cccaattaaatcaccttcactttcgactggatgagcttggcagacttgaa

SEQ ID NO: 55602 - DNA, 50 bp, synthetic construct
  source 1..50: mol_type = other DNA
aagggcggaaatgattgtttatttaaaaatagaaaattggcaggacaatt

SEQ ID NO: 55603 - DNA, 50 bp, synthetic construct
  source 1..50: mol_type = other DNA
ccattttttatgtttcgcttttttataaaaaagtgagcatcaaagcataa

SEQ ID NO: 55604 - DNA, 50 bp, synthetic construct
  source 1..50: mol_type = other DNA
ttagaacaacattttcattcatcactctataaaagaatgcctctctttcg

SEQ ID NO: 55605 - DNA, 50 bp, synthetic construct
  source 1..50: mol_type = other DNA
tgatagttgaccctcccgtgtcctcttggccacgcctttatcaatgtagt

SEQ ID NO: 55606 - DNA, 50 bp, synthetic construct
  source 1..50: mol_type = other DNA
tttaccctgaaaagagacttcacagatatgaagctgctagtgacatacat

SEQ ID NO: 55607 - DNA, 50 bp, synthetic construct
  source 1..50: mol_type = other DNA
ctgatagacgccgctggaggcgcgatcccgcgccgaggggcggggggtat

SEQ ID NO: 55608 - DNA, 50 bp, synthetic construct
  source 1..50: mol_type = other DNA
ttagagcttccaaattaagtttcgatataaattctattgagaagctattg

SEQ ID NO: 55609 - DNA, 50 bp, synthetic construct
  source 1..50: mol_type = other DNA
tctttattgatagaatcccaacagtacatcaaattatagaacccatatcc

SEQ ID NO: 55610 - DNA, 50 bp, synthetic construct
  source 1..50: mol_type = other DNA
gtattttcttgagtctttacttttaacaaaacgaaaaatggagaaaatac

SEQ ID NO: 55611 - DNA, 50 bp, synthetic construct
  source 1..50: mol_type = other DNA
ttaattactacctacacaataccaatcggtattgagtcggtgttaataac

SEQ ID NO: 55612 - DNA, 50 bp, synthetic construct
  source 1..50: mol_type = other DNA
gtgataattaaaatttcgctatactagtataacaaactaataatcaagct

SEQ ID NO: 55613 - DNA, 50 bp, synthetic construct
  source 1..50: mol_type = other DNA
gcgtcggctcgtgggtggtcgcaccggatccaccaccgccaggccgccgc

SEQ ID NO: 55614 - DNA, 50 bp, synthetic construct
  source 1..50: mol_type = other DNA
ataccggcgtcgcctccctggtctgtagaccggggagggagggccgttat

SEQ ID NO: 55615 - DNA, 50 bp, synthetic construct
  source 1..50: mol_type = other DNA
ctattcgaggacctgccgggcctgctcaatccctcgaggtatgaccggct

SEQ ID NO: 55616 - DNA, 50 bp, synthetic construct
  source 1..50: mol_type = other DNA
acgcgccagcccctgtcgctgggcccgatgagcgacaagccggcaaggaa

SEQ ID NO: 55617 - DNA, 50 bp, synthetic construct
  source 1..50: mol_type = other DNA
tgcaagaagcatctctcccaaaaggactaaggggagggcttcatcatgca

SEQ ID NO: 55618 - DNA, 50 bp, synthetic construct
  source 1..50: mol_type = other DNA
gctcggcaagcaggtgacgctgatcgatatcaccattgcgcttgccgagg

SEQ ID NO: 55619 - DNA, 50 bp, synthetic construct
  source 1..50: mol_type = other DNA
gagttgttataggaaactcactccacggaataggttttctataaccgaca

SEQ ID NO: 55620 - DNA, 50 bp, synthetic construct
  source 1..50: mol_type = other DNA
taaaaaagttttgacactaggtatttacagagtttttcatcactttctta

SEQ ID NO: 55621 - DNA, 50 bp, synthetic construct
  source 1..50: mol_type = other DNA
ggccgatgacgctgtcacagcggacgtcgaccgtcttgccggatacggcc

SEQ ID NO: 55622 - DNA, 50 bp, synthetic construct
  source 1..50: mol_type = other DNA
ttcaatgatataatagaagttgcttaaaaggtatttatgatataatggga

SEQ ID NO: 55623 - DNA, 50 bp, synthetic construct
  source 1..50: mol_type = other DNA
acattgttgatgcttcatgtaattatcacggcatgacgggaaattaaagg

SEQ ID NO: 55624 - DNA, 50 bp, synthetic construct
  source 1..50: mol_type = other DNA
gaaaaatcaccatctgcgaagagcaagccaatcaaagatggtgcattaga

SEQ ID NO: 55625 - DNA, 50 bp, synthetic construct
  source 1..50: mol_type = other DNA
ccggctcctacacacctgagtttgatcaatgggagccgtgtcacagccgg

SEQ ID NO: 55626 - DNA, 50 bp, synthetic construct
  source 1..50: mol_type = other DNA
cctgttcttccagacggaaggatgggtacatttcattctggatgatgcgg

SEQ ID NO: 55627 - DNA, 50 bp, synthetic construct
  source 1..50: mol_type = other DNA
gggtgttgtttttgggtagtgttgtacaaatataaaaaggctacacactg

SEQ ID NO: 55628 - DNA, 50 bp, synthetic construct
  source 1..50: mol_type = other DNA
ttttatcttgcggagaagaggggtcgacccccttctcccgcactctaagt

SEQ ID NO: 55629 - DNA, 50 bp, synthetic construct
  source 1..50: mol_type = other DNA
atgttgccgctccagtcccggagggcttactgcgacgccgacggcaacta

SEQ ID NO: 55630 - DNA, 50 bp, synthetic construct
  source 1..50: mol_type = other DNA
tcgcgatcaaggtcctccggcgatccgctttcggcgggccttaatctcga

SEQ ID NO: 55631 - DNA, 50 bp, synthetic construct
  source 1..50: mol_type = other DNA
gctccttcctattcttagcttttgataacaagcggattatcagaaaatgc

SEQ ID NO: 55632 - DNA, 50 bp, synthetic construct
  source 1..50: mol_type = other DNA
tacgcgcccccaagggtcggcgacggcaagctgaccctgctggaccagaa

SEQ ID NO: 55633 - DNA, 50 bp, synthetic construct
  source 1..50: mol_type = other DNA
tcattcgactgagtaataggaaataaataccatgcttgtctgtcgtcgga

SEQ ID NO: 55634 - DNA, 50 bp, synthetic construct
  source 1..50: mol_type = other DNA
cgctcaatggccgggcagcctccagccgcgcatgcgccggatcagcatcg

SEQ ID NO: 55635 - DNA, 50 bp, synthetic construct
  source 1..50: mol_type = other DNA
agctccgggagataatgctaaaatatatttctcatttctgagcatggtgt

SEQ ID NO: 55636 - DNA, 50 bp, synthetic construct
  source 1..50: mol_type = other DNA
cttcatataaatgcctattggtgaatatggaatgtgttgcttatatgaga

SEQ ID NO: 55637 - DNA, 50 bp, synthetic construct
  source 1..50: mol_type = other DNA
ggtgaaatttctgatacttgtttcatgaaaaaaatagtagatgtgtcact

SEQ ID NO: 55638 - DNA, 50 bp, synthetic construct
  source 1..50: mol_type = other DNA
agctgatatatacttttagcattgaaaaacgaaaaaagtgacgatagtga

SEQ ID NO: 55639 - DNA, 50 bp, synthetic construct
  source 1..50: mol_type = other DNA
gtgagccgctcaacgtgtgctattataatagtttttccgcgcggaatcat

SEQ ID NO: 55640 - DNA, 50 bp, synthetic construct
  source 1..50: mol_type = other DNA
ctttcgataaaaatcttcccggctccgcaagggtttatttttatactctt

SEQ ID NO: 55641 - DNA, 50 bp, synthetic construct
  source 1..50: mol_type = other DNA
atttttgtattcatcaatatataaggttttttatgaatacatattttcat

SEQ ID NO: 55642 - DNA, 50 bp, synthetic construct
  source 1..50: mol_type = other DNA
actctaatttccctttcagttgaaacagagcatgagaatcaaagtaatca

SEQ ID NO: 55643 - DNA, 50 bp, synthetic construct
  source 1..50: mol_type = other DNA
atccatccaagtagttctcatagatgaagatgaatatgggatgaggcgat

SEQ ID NO: 55644 - DNA, 50 bp, synthetic construct
  source 1..50: mol_type = other DNA
tatggatatcgcatagaggatggcaagattactatagcgcagaaaccata

SEQ ID NO: 55645 - DNA, 50 bp, synthetic construct
  source 1..50: mol_type = other DNA
ttccatacggttagcaccttgcagaaaatcaaggtattagtatgttcggc

SEQ ID NO: 55646 - DNA, 50 bp, synthetic construct
  source 1..50: mol_type = other DNA
gataagtgataacatagatttcggaaacgctctataatttccataaaata

SEQ ID NO: 55647 - DNA, 50 bp, synthetic construct
  source 1..50: mol_type = other DNA
cagtaaagttctttttagcgtttaatcaagtcttaggaggaaatttacac

SEQ ID NO: 55648 - DNA, 50 bp, synthetic construct
  source 1..50: mol_type = other DNA
ggacaagtaccgggtactgtcctccggaggcggcggctggcgaactgtcc

SEQ ID NO: 55649 - DNA, 50 bp, synthetic construct
  source 1..50: mol_type = other DNA
cttagtgcatttaccaccttgctggaggacaaaatgttacaggcagacaa

SEQ ID NO: 55650 - DNA, 50 bp, synthetic construct
  source 1..50: mol_type = other DNA
tatgttgattattattgaaaagttacctattttttaataaaatcaaatat

SEQ ID NO: 55651 - DNA, 50 bp, synthetic construct
  source 1..50: mol_type = other DNA
cagccatattataaccactccttaattaagaagggaacaggaatggtcat

SEQ ID NO: 55652 - DNA, 50 bp, synthetic construct
  source 1..50: mol_type = other DNA
aatagtcctgtgagctcctgtgtgccgtcacgaaaataatcaggaaaata

SEQ ID NO: 55653 - DNA, 50 bp, synthetic construct
  source 1..50: mol_type = other DNA
gaataatcataacatttcccatcaaaaaatcggacatgttcagatttcct

SEQ ID NO: 55654 - DNA, 50 bp, synthetic construct
  source 1..50: mol_type = other DNA
ttcgccttttcacgggaaatataaatttaccgtttggtcgattgggaacg

SEQ ID NO: 55655 - DNA, 50 bp, synthetic construct
  source 1..50: mol_type = other DNA
tgcagtccagatgaacggaaagaaatgagttttaaagcgtaagaaaaagc

SEQ ID NO: 55656 - DNA, 50 bp, synthetic construct
  source 1..50: mol_type = other DNA
tgcggcatctatataatccccggcatttatggaattatagtgatgacaga

SEQ ID NO: 55657 - DNA, 50 bp, synthetic construct
  source 1..50: mol_type = other DNA
acatttttctctctccattcttccgggccagaaatgagaaagaagaaaat

SEQ ID NO: 55658 - DNA, 50 bp, synthetic construct
  source 1..50: mol_type = other DNA
gcaggaataccttggtcacatggtcaaccacatggcaaaggaggtggacg

SEQ ID NO: 55659 - DNA, 50 bp, synthetic construct
  source 1..50: mol_type = other DNA
caaaaagcaagcggtattaatcatatattgaacgcacagctacgagcttt

SEQ ID NO: 55660 - DNA, 50 bp, synthetic construct
  source 1..50: mol_type = other DNA
catggaaggttcctgctcctgccaccgatcaggaatctcaactcccaatc

SEQ ID NO: 55661 - DNA, 50 bp, synthetic construct
  source 1..50: mol_type = other DNA
ataggcataaacatctgcagaccacttcgtctgcataagttcctgcatat

SEQ ID NO: 55662 - DNA, 50 bp, synthetic construct
  source 1..50: mol_type = other DNA
tatgaccatcgttaaattgaaacagctcgatcgcctttaaactcaccatc

SEQ ID NO: 55663 - DNA, 50 bp, synthetic construct
  source 1..50: mol_type = other DNA
ctggtcggccgtcttgaagccgatgcacttttttcatgacaacttcacct

SEQ ID NO: 55664 - DNA, 50 bp, synthetic construct
  source 1..50: mol_type = other DNA
tattgaatgaacggtttgccgaaagctttttacaaacgcatcatatataa

SEQ ID NO: 55665 - DNA, 50 bp, synthetic construct
  source 1..50: mol_type = other DNA
gtggatctgtccacatcctctttttttcttatggagaatgaacgcaccat

SEQ ID NO: 55666 - DNA, 50 bp, synthetic construct
  source 1..50: mol_type = other DNA
atttgttgtggcttatcgctcacagctacatccgagttggatttctgaat

SEQ ID NO: 55667 - DNA, 50 bp, synthetic construct
  source 1..50: mol_type = other DNA
tgccttaccatttggcgatagcccatattgtatcacataatggaacatct

SEQ ID NO: 55668 - DNA, 50 bp, synthetic construct
  source 1..50: mol_type = other DNA
tgaacactgcggttcggacggttacgtgaccttcaactgcaagccgttca

SEQ ID NO: 55669 - DNA, 50 bp, synthetic construct
  source 1..50: mol_type = other DNA
cagatcggtgcccttcttttcattgaaatgaaagaaaaggcacggcagca

SEQ ID NO: 55670 - DNA, 50 bp, synthetic construct
  source 1..50: mol_type = other DNA
tgttgtaccaacttaacactacccgtgggctgtgttaagttggtacaaaa

SEQ ID NO: 55671 - DNA, 50 bp, synthetic construct
  source 1..50: mol_type = other DNA
gaacgaaatcaagctgtccgccggcacgtgcgataataacaaatcccgaa

SEQ ID NO: 55672 - DNA, 50 bp, synthetic construct
  source 1..50: mol_type = other DNA
ctttctttataaaaatagctgtgatatcacttgagtttgtaataacaaat

SEQ ID NO: 55673 - DNA, 50 bp, synthetic construct
  source 1..50: mol_type = other DNA
ggtataaaaaagaaagccgattgattattatcctctttcccaattcggac

SEQ ID NO: 55674 - DNA, 50 bp, synthetic construct
  source 1..50: mol_type = other DNA
cattcggcgctgtgctcattttcgatcaaaaatgtatcttccgccccacc

SEQ ID NO: 55675 - DNA, 50 bp, synthetic construct
  source 1..50: mol_type = other DNA
tcacactcctttactttttaccaacattggtctgaaattaccaattgtat

SEQ ID NO: 55676 - DNA, 50 bp, synthetic construct
  source 1..50: mol_type = other DNA
atattatatcaacatatattttatatctgaacaatgaacagattgaatat

SEQ ID NO: 55677 - DNA, 50 bp, synthetic construct
  source 1..50: mol_type = other DNA
atacttggttttaagttcttggcaattgctgaaatgttacatttccgtaa

SEQ ID NO: 55678 - DNA, 50 bp, synthetic construct
  source 1..50: mol_type = other DNA
atatcaagtcaatatcggcaaataattcgattaacatatggacttgatgt

SEQ ID NO: 55679 - DNA, 50 bp, synthetic construct
  source 1..50: mol_type = other DNA
agaattacaggaaaaactggcacgaaggtcgttggttcaaatccagctcc

SEQ ID NO: 55680 - DNA, 50 bp, synthetic construct
  source 1..50: mol_type = other DNA
aaatactcttaaatatagtatttccagaaatactattttttaataaatta

SEQ ID NO: 55681 - DNA, 50 bp, synthetic construct
  source 1..50: mol_type = other DNA
atccatccaagtagttctcatagatgaagatgaatatgggatgcggcggt

SEQ ID NO: 55682 - DNA, 50 bp, synthetic construct
  source 1..50: mol_type = other DNA
tctcatatctgttacatttaatattagcttctgataattgagatttgaga

SEQ ID NO: 55683 - DNA, 50 bp, synthetic construct
  source 1..50: mol_type = other DNA
atatttctgctttttgggattctatattgacaccggatttaaaggaatac

SEQ ID NO: 55684 - DNA, 50 bp, synthetic construct
  source 1..50: mol_type = other DNA
caccagattgggaacctgagaaatctgttatttttgtacccaaaaaagga

SEQ ID NO: 55685 - DNA, 50 bp, synthetic construct
  source 1..50: mol_type = other DNA
tcattgtcatagatgatgatatctggcctgcttttcatttatgaccgctt

SEQ ID NO: 55686 - DNA, 50 bp, synthetic construct
  source 1..50: mol_type = other DNA
tttttttgataaaatatatagccgtttctctatacttttcaagaaagttt

SEQ ID NO: 55687 - DNA, 50 bp, synthetic construct
  source 1..50: mol_type = other DNA
tgatgaaacggcagcagctatggtgctgcataatttgacgtaaatcatca

SEQ ID NO: 55688 - DNA, 50 bp, synthetic construct
  source 1..50: mol_type = other DNA
tgtttgcggacagttttcttcttgcaaaatgagtacacccctgatagaca

SEQ ID NO: 55689 - DNA, 50 bp, synthetic construct
  source 1..50: mol_type = other DNA
actgctacccgctgcccaggcctcgcactggcaaagcagctggctgcaga

SEQ ID NO: 55690 - DNA, 50 bp, synthetic construct
  source 1..50: mol_type = other DNA
ctgcacgcacttcctttctgtatttcctcgtaaaaatcaagtcttaggag

SEQ ID NO: 55691 - DNA, 50 bp, synthetic construct
  source 1..50: mol_type = other DNA
taatgatatagttaaactacgagttcgttggtggttcgactatatcattc

SEQ ID NO: 55692 - DNA, 50 bp, synthetic construct
  source 1..50: mol_type = other DNA
aactatgatctgctttataaaaatgaacatggcatacgcagacctgcggc

SEQ ID NO: 55693 - DNA, 50 bp, synthetic construct
  source 1..50: mol_type = other DNA
attatctttgctaaaacaggtgagaaaccagcttgtttagcatagttaca

SEQ ID NO: 55694 - DNA, 50 bp, synthetic construct
  source 1..50: mol_type = other DNA
gctttgaggcacaggtcgagtattataatacagagcctgtcagtataaca

SEQ ID NO: 55695 - DNA, 50 bp, synthetic construct
  source 1..50: mol_type = other DNA
gtgtagatcacccggaaaccccgctgtcggggattttatgccggaagcat

SEQ ID NO: 55696 - DNA, 50 bp, synthetic construct
  source 1..50: mol_type = other DNA
tttttgctactctttttttctttgctcatagaaagcgagagtcaataatg

SEQ ID NO: 55697 - DNA, 50 bp, synthetic construct
  source 1..50: mol_type = other DNA
tgaaaaacagcaccccggctgcacgatagaatccggcagattgtttccag

SEQ ID NO: 55698 - DNA, 50 bp, synthetic construct
  source 1..50: mol_type = other DNA
tgctgcgataatcataaaaaagacctcccttggattgcagatacgcagca

SEQ ID NO: 55699 - DNA, 50 bp, synthetic construct
  source 1..50: mol_type = other DNA
cgccccgaaaaaaaacatacggaaaattccccttgttcgcttttctcctc

SEQ ID NO: 55700 - DNA, 50 bp, synthetic construct
  source 1..50: mol_type = other DNA
acgtgtggtaatgccaccgccttttcttgtcaattatcattccagtatat

SEQ ID NO: 55701 - DNA, 50 bp, synthetic construct
  source 1..50: mol_type = other DNA
atatattaaaaaagggtataaaaatatttttcgattagattttggcttac

SEQ ID NO: 55702 - DNA, 50 bp, synthetic construct
  source 1..50: mol_type = other DNA
ctatgatggaggcttttgatgaaaaacttgctcaaaatttccaatcaact

SEQ ID NO: 55703 - DNA, 50 bp, synthetic construct
  source 1..50: mol_type = other DNA
acggacggcatccacaggaatttctgtcaattagagaggctgaatgagcg

SEQ ID NO: 55704 - DNA, 50 bp, synthetic construct
  source 1..50: mol_type = other DNA
tatgaccacacagtgtctgtttcatttgacaaaaacaaattggaatgata

SEQ ID NO: 55705 - DNA, 50 bp, synthetic construct
  source 1..50: mol_type = other DNA
aagctccaggctttctccggcctttaaggggctgattttttatggattcc

SEQ ID NO: 55706 - DNA, 50 bp, synthetic construct
  source 1..50: mol_type = other DNA
gcgaaagaagtggtttacccggtaatttccatgtgagcgagttctttcgc

SEQ ID NO: 55707 - DNA, 50 bp, synthetic construct
  source 1..50: mol_type = other DNA
ttttcctccgtttttttggttgttttaagcctgtcggtataggaggaaaa

SEQ ID NO: 55708 - DNA, 50 bp, synthetic construct
  source 1..50: mol_type = other DNA
cactacggcacaaaaaataaattatacgaaacgaattcatagccattgta

SEQ ID NO: 55709 - DNA, 50 bp, synthetic construct
  source 1..50: mol_type = other DNA
gaaaaatccatccgtcatgactttcatttactttaaggggctgatttttt

SEQ ID NO: 55710 - DNA, 50 bp, synthetic construct
  source 1..50: mol_type = other DNA
ttgtttgtataagcataacacacttgagtgtgtgacgcttattacaacac

SEQ ID NO: 55711 - DNA, 50 bp, synthetic construct
  source 1..50: mol_type = other DNA
tataaatggaaaagcagaggttgatgttcaaatctgcacttttcattatc

SEQ ID NO: 55712 - DNA, 50 bp, synthetic construct
  source 1..50: mol_type = other DNA
cactgtcctgaagtcaagagggaaattttaaagttgtggtatatacatta

SEQ ID NO: 55713 - DNA, 50 bp, synthetic construct
  source 1..50: mol_type = other DNA
ctatgtaattatatgtaaaaaagtattcccgcataaatcatacatcagat

SEQ ID NO: 55714 - DNA, 50 bp, synthetic construct
  source 1..50: mol_type = other DNA
taaaattttaggagcggctatgttaaaaagctgaggaagagaaaatttta

SEQ ID NO: 55715 - DNA, 50 bp, synthetic construct
  source 1..50: mol_type = other DNA
ttgtggaaaaaaagaaaaataggcatatttttttaccttttatgttacaa

SEQ ID NO: 55716 - DNA, 50 bp, synthetic construct
  source 1..50: mol_type = other DNA
aataaaattttatttaccataaaattttttatgcttaagacagttatata

SEQ ID NO: 55717 - DNA, 50 bp, synthetic construct
  source 1..50: mol_type = other DNA
catcatcaaccatctcaacgcccacagtaccgtatcggcatttgtaaata

SEQ ID NO: 55718 - DNA, 50 bp, synthetic construct
  source 1..50: mol_type = other DNA
aacatacacaacctttctattttttcagatttatcaagaatgatcttttg

SEQ ID NO: 55719 - DNA, 50 bp, synthetic construct
  source 1..50: mol_type = other DNA
tgctgcgataatcataaaaaagacctcccttggattgcagatacgcagcg

SEQ ID NO: 55720 - DNA, 50 bp, synthetic construct
  source 1..50: mol_type = other DNA
taaagcttaatagattgaatttgtaaacgttcaacctcaattaatcattt

SEQ ID NO: 55721 - DNA, 50 bp, synthetic construct
  source 1..50: mol_type = other DNA
atttcaaataatatgttttttggaatattaaataaattattgcaagaaat

SEQ ID NO: 55722 - DNA, 50 bp, synthetic construct
  source 1..50: mol_type = other DNA
ctataatataatctaataaatttttaaaaatgaataaaattgcaatttac

SEQ ID NO: 55723 - DNA, 50 bp, synthetic construct
  source 1..50: mol_type = other DNA
ttatccataattagctccctttccatggagagaaacggaagaatggaatt

SEQ ID NO: 55724 - DNA, 50 bp, synthetic construct
  source 1..50: mol_type = other DNA
ccattcttatcgtcctttctctgaattcagccagaagcacctcagaatgg

SEQ ID NO: 55725 - DNA, 50 bp, synthetic construct
  source 1..50: mol_type = other DNA
ttcttggatacctttcacctttcttttaccagcagaatttgattaaactg

SEQ ID NO: 55726 - DNA, 50 bp, synthetic construct
  source 1..50: mol_type = other DNA
ccatcaaataacctcgctttctataagacgaatgtgatcatgggcgatac

SEQ ID NO: 55727 - DNA, 50 bp, synthetic construct
  source 1..50: mol_type = other DNA
tcgaggaattaatacgtaagtttaatcgataactgcgatgccattctcga

SEQ ID NO: 55728 - DNA, 50 bp, synthetic construct
  source 1..50: mol_type = other DNA
gttatgagccgggggctctaccgctgcttgtagacagcctggaccataga

SEQ ID NO: 55729 - DNA, 50 bp, synthetic construct
  source 1..50: mol_type = other DNA
taaagggaaaaagatggtacttcatctgatatgacaccgttttctaacat

SEQ ID NO: 55730 - DNA, 50 bp, synthetic construct
  source 1..50: mol_type = other DNA
tcgtcaggctaacgcttcagtagcttgccccacaggcggaagccgttgat

SEQ ID NO: 55731 - DNA, 50 bp, synthetic construct
  source 1..50: mol_type = other DNA
ttgttttttgcttttgatagcatttgccaaggataaaaaggtgaaaggta

SEQ ID NO: 55732 - DNA, 50 bp, synthetic construct
  source 1..50: mol_type = other DNA
gatcccggatcgtaactgcatgttttgtcatgcgataagagtccgggtac

SEQ ID NO: 55733 - DNA, 50 bp, synthetic construct
  source 1..50: mol_type = other DNA
ctctcattatcctctacctcttttataaaagataatgatgatagagttgg

SEQ ID NO: 55734 - DNA, 50 bp, synthetic construct
  source 1..50: mol_type = other DNA
gtttttcgtcttacccacactcacggcttactgtaggtaagttgaaatct

SEQ ID NO: 55735 - DNA, 50 bp, synthetic construct
  source 1..50: mol_type = other DNA
tatcagactatatatgtactctgcctggttgttacatgaattcattaata

SEQ ID NO: 55736 - DNA, 50 bp, synthetic construct
  source 1..50: mol_type = other DNA
gaaaaggtggtgagataaatggcatatgatgtgtgtatcaaaattttttt

SEQ ID NO: 55737 - DNA, 50 bp, synthetic construct
  source 1..50: mol_type = other DNA
attcaaatcaaaagtcagaattgatatcaattctgtgaatttatgcttgc

SEQ ID NO: 55738 - DNA, 50 bp, synthetic construct
  source 1..50: mol_type = other DNA
aaagaaagccgattgatttttccggctttaacggacaattcggtttctga

SEQ ID NO: 55739 - DNA, 50 bp, synthetic construct
  source 1..50: mol_type = other DNA
agcagcaccagaaattacgtatgatcgctgactagtattatggggctgtt

SEQ ID NO: 55740 - DNA, 50 bp, synthetic construct
  source 1..50: mol_type = other DNA
tacttacctccattaactgtggtgtacaccgcagtaaaaaggataaaatt

SEQ ID NO: 55741 - DNA, 50 bp, synthetic construct
  source 1..50: mol_type = other DNA
aagtatgcaaaaatgcttgtacattacattttcacaaaggagtgatacct

SEQ ID NO: 55742 - DNA, 50 bp, synthetic construct
  source 1..50: mol_type = other DNA
tagcactgaattaaatagtataaatatatagactaccaaaacggaaggag

SEQ ID NO: 55743 - DNA, 50 bp, synthetic construct
  source 1..50: mol_type = other DNA
ctggctgctctggggcatatcatcatctccagatttaccagaatatatta

SEQ ID NO: 55744 - DNA, 50 bp, synthetic construct
  source 1..50: mol_type = other DNA
gccggattacatcaacagcgatacaacgacaacccttgaaaggagccgtg

SEQ ID NO: 55745 - DNA, 50 bp, synthetic construct
  source 1..50: mol_type = other DNA
ctctaagcatcaaatcactcctttatggaattggaatttaattcttatag

SEQ ID NO: 55746 - DNA, 50 bp, synthetic construct
  source 1..50: mol_type = other DNA
gccgccgggcaccggcaaaagcatgcttgcgcccgatccggcgtccacgg

SEQ ID NO: 55747 - DNA, 50 bp, synthetic construct
  source 1..50: mol_type = other DNA
cagcctactgccgtgtttccacggatcaggaataagctctcgaagtttcc

SEQ ID NO: 55748 - DNA, 50 bp, synthetic construct
  source 1..50: mol_type = other DNA
ctggccgtccatatccatccggtcaggagaccattgctaagattaggaag

SEQ ID NO: 55749 - DNA, 50 bp, synthetic construct
  source 1..50: mol_type = other DNA
ttgtcgtacagctttttgcccttgcaacaaacttaaaactacttgaaagg

SEQ ID NO: 55750 - DNA, 50 bp, synthetic construct
  source 1..50: mol_type = other DNA
catcaaattcaggaggatatacccatctgtatagcctgctgcattaagtg

SEQ ID NO: 55751 - DNA, 50 bp, synthetic construct
  source 1..50: mol_type = other DNA
cataattaagaaagaagctatgactaggctggcttttatgtttatttatg

SEQ ID NO: 55752 - DNA, 50 bp, synthetic construct
  source 1..50: mol_type = other DNA
tggcatttttgtcaacggattttataaaaaaccatgaatagttgtgtcat

SEQ ID NO: 55753 - DNA, 50 bp, synthetic construct
  source 1..50: mol_type = other DNA
agatctaagttgagcgccaagcagcgttactccatgccctaccccgagct

SEQ ID NO: 55754 - DNA, 50 bp, synthetic construct
  source 1..50: mol_type = other DNA
cccgggattcgccttgataagctcatcaatcgttcaactttaatctgtta

SEQ ID NO: 55755 - DNA, 50 bp, synthetic construct
  source 1..50: mol_type = other DNA
gccggctttctgctcgttttcgttcaaagaaaacacttgctattattggc

SEQ ID NO: 55756 - DNA, 50 bp, synthetic construct
  source 1..50: mol_type = other DNA
aatttttcggttatagcggataaaacgggcatgaaaataaaggaaaaatc

SEQ ID NO: 55757 - DNA, 50 bp, synthetic construct
  source 1..50: mol_type = other DNA
taatcttataatcaatgaatgtcttccgatgatcgaacacatgaaatata

SEQ ID NO: 55758 - DNA, 50 bp, synthetic construct
  source 1..50: mol_type = other DNA
ggccacacacggctcgcgccagggagcccgagcgcgatcggtcaaaagcc

SEQ ID NO: 55759 - DNA, 50 bp, synthetic construct
  source 1..50: mol_type = other DNA
tgatatgtagttacgcatgtcataaatccggcaagacggtttatatatcg

SEQ ID NO: 55760 - DNA, 50 bp, synthetic construct
  source 1..50: mol_type = other DNA
aagaggaaacggcatgaccccgaaaggccgggcaggtggtcaacgtttct

SEQ ID NO: 55761 - DNA, 50 bp, synthetic construct
  source 1..50: mol_type = other DNA
tgcggcgattatttgaaaactacctcagttcttcgaaaatatatcccatc

SEQ ID NO: 55762 - DNA, 50 bp, synthetic construct
  source 1..50: mol_type = other DNA
atataataaaaagtatggaaaacagccgtttacctcacttttctttaagt

SEQ ID NO: 55763 - DNA, 50 bp, synthetic construct
  source 1..50: mol_type = other DNA
atctggcagctttacctttgccatgcatggccgcagttgccgcagatgac

SEQ ID NO: 55764 - DNA, 50 bp, synthetic construct
  source 1..50: mol_type = other DNA
cggcgcgtgctagactacgcagtgacaacaatgtagtcaccgtcttgtgc

SEQ ID NO: 55765 - DNA, 50 bp, synthetic construct
  source 1..50: mol_type = other DNA
agatgcagtatttactcatgttgcatctcgcaggagtatggcgtgcctct

SEQ ID NO: 55766 - DNA, 50 bp, synthetic construct
  source 1..50: mol_type = other DNA
gaacaacagggtccgattcttctgaaaagaacgatcagatgctgaaaacc

SEQ ID NO: 55767 - DNA, 50 bp, synthetic construct
  source 1..50: mol_type = other DNA
ttccacattttcttttccatagttgatctgaaggaaaagaacgatcagat

SEQ ID NO: 55768 - DNA, 50 bp, synthetic construct
  source 1..50: mol_type = other DNA
taaaaaaaataaggctctaccaattaagttacctagccagattttttata

SEQ ID NO: 55769 - DNA, 50 bp, synthetic construct
  source 1..50: mol_type = other DNA
aagggattccgagagatttgccgattacggcacttttacgggaatatgtc

SEQ ID NO: 55770 - DNA, 50 bp, synthetic construct
  source 1..50: mol_type = other DNA
tctactgtcacggaacaagtaaaaaattttcagatccatttgaacaggcg

SEQ ID NO: 55771 - DNA, 50 bp, synthetic construct
  source 1..50: mol_type = other DNA
tatttctatcatttacgagctaacgaataagctcattaatgatagaaata

SEQ ID NO: 55772 - DNA, 50 bp, synthetic construct
  source 1..50: mol_type = other DNA
aagacaggagcagtcatccgtgctattcgacggtggcgcgctgctcctca

SEQ ID NO: 55773 - DNA, 50 bp, synthetic construct
  source 1..50: mol_type = other DNA
agaaagaaaataaccttgttcaattgcttgactttcaggcacttctgatt

SEQ ID NO: 55774 - DNA, 50 bp, synthetic construct
  source 1..50: mol_type = other DNA
ttcagctcctttttgacgccattcaaaagccaccggagaaaggagcagaa

SEQ ID NO: 55775 - DNA, 50 bp, synthetic construct
  source 1..50: mol_type = other DNA
agtcatcaaaagctcagtaaaatcaggaaaaagtaaataatgggacaaag

SEQ ID NO: 55776 - DNA, 50 bp, synthetic construct
  source 1..50: mol_type = other DNA
ccatcatgattaaaatcaaacaaatttttcttctattataatatgtgtca

SEQ ID NO: 55777 - DNA, 50 bp, synthetic construct
  source 1..50: mol_type = other DNA
tattcccgtaactcccaagctttatccaattcttggtttgtgacctaata

SEQ ID NO: 55778 - DNA, 50 bp, synthetic construct
  source 1..50: mol_type = other DNA
aatataaacaggcttttgatagggaatggtaaaaaaattgtgaatatatc

SEQ ID NO: 55779 - DNA, 50 bp, synthetic construct
  source 1..50: mol_type = other DNA
ccccaagtaacgtgtcattattatattgaatattattggtgaaattttat

SEQ ID NO: 55780 - DNA, 50 bp, synthetic construct
  source 1..50: mol_type = other DNA
cctgtttaccttcattacattctgtacggaagaaactgaaggaaatatgg

SEQ ID NO: 55781 - DNA, 50 bp, synthetic construct
  source 1..50: mol_type = other DNA
agatttttaccatatcctgttctgaactgttcaactgttcttcctgatct

SEQ ID NO: 55782 - DNA, 50 bp, synthetic construct
  source 1..50: mol_type = other DNA
acaaactatcaaccacacaaagaaaaccatttgatcggctgcactttttc

SEQ ID NO: 55783 - DNA, 50 bp, synthetic construct
  source 1..50: mol_type = other DNA
gacggccttgcagacaagatcgacatcatctccatgtgtgcaagttcatc

SEQ ID NO: 55784 - DNA, 50 bp, synthetic construct
  source 1..50: mol_type = other DNA
ttgcaaaaatttatgtgaggttaaaatatctctcaccagaattttcctat

SEQ ID NO: 55785 - DNA, 50 bp, synthetic construct
  source 1..50: mol_type = other DNA
cggagatcagtggtttttgctttcgggttttatgaaagcagtcatctacg

SEQ ID NO: 55786 - DNA, 50 bp, synthetic construct
  source 1..50: mol_type = other DNA
tataatgacggtataggagccatttgaattccccggaaacgctgattttc

SEQ ID NO: 55787 - DNA, 50 bp, synthetic construct
  source 1..50: mol_type = other DNA
ctgaattttgttgctttaggtcgtaaccgctgcaaaattgcaaaaccaag

SEQ ID NO: 55788 - DNA, 50 bp, synthetic construct
  source 1..50: mol_type = other DNA
aaagttatctggactaatacctggtaagcagtatgcgagtaaaaaagatt

SEQ ID NO: 55789 - DNA, 50 bp, synthetic construct
  source 1..50: mol_type = other DNA
tcggctatatggatccgactctgaattcaagtgaaaattgatatttgaaa

SEQ ID NO: 55790 - DNA, 50 bp, synthetic construct
  source 1..50: mol_type = other DNA
cagtccggggcggtgtttatttgcctgcgaaccatgacgcgcccgcactg

SEQ ID NO: 55791 - DNA, 50 bp, synthetic construct
  source 1..50: mol_type = other DNA
atattggataagatattttaaaagtaatcttaaaatattgtatcaaataa

SEQ ID NO: 55792 - DNA, 50 bp, synthetic construct
  source 1..50: mol_type = other DNA
tttctgttactaggtatatatggtagaccatataaaagtgtacgatgatt

SEQ ID NO: 55793 - DNA, 50 bp, synthetic construct
  source 1..50: mol_type = other DNA
gcggattttttattcagccttatcttaaggagtcaaacaaaaagggtctg

SEQ ID NO: 55794 - DNA, 50 bp, synthetic construct
  source 1..50: mol_type = other DNA
ggaatatactacacgaagataccccatattatcccgtttcagttccagcg

SEQ ID NO: 55795 - DNA, 50 bp, synthetic construct
  source 1..50: mol_type = other DNA
catgccaagaacattgaacgctgtatatgccgactgtgcagggtgttaat

SEQ ID NO: 55796 - DNA, 50 bp, synthetic construct
  source 1..50: mol_type = other DNA
tatgcgtaaaataagtctatggctacaccgataaacttactttacgcata

SEQ ID NO: 55797 - DNA, 50 bp, synthetic construct
  source 1..50: mol_type = other DNA
ctgacggtcaggcttgatgcctgacgtcaggctcataacctgaaggtcac

SEQ ID NO: 55798 - DNA, 50 bp, synthetic construct
  source 1..50: mol_type = other DNA
tgttgtactaatgtaacactacccgtgggcagtgttaagttagtacaaat

SEQ ID NO: 55799 - DNA, 50 bp, synthetic construct
  source 1..50: mol_type = other DNA
taaaagttatactccaaataaatctttttttattgtgggagtaactttta

SEQ ID NO: 55800 - DNA, 50 bp, synthetic construct
  source 1..50: mol_type = other DNA
acaaggaatgctaatcaaatcaggaagatgatatgattgatggtcagctc

SEQ ID NO: 55801 - DNA, 50 bp, synthetic construct
  source 1..50: mol_type = other DNA
tcttttttccgataccgtttgttttctccacactggtttttgaaaaaacc

SEQ ID NO: 55802 - DNA, 50 bp, synthetic construct
  source 1..50: mol_type = other DNA
ttttcgcttaaaattcatatggtctatgaattatgaaccgatatggaaaa

SEQ ID NO: 55803 - DNA, 50 bp, synthetic construct
  source 1..50: mol_type = other DNA
ttctatgaggctgtacaggtattccggaaaacttttgatttctgtactat

SEQ ID NO: 55804 - DNA, 50 bp, synthetic construct
  source 1..50: mol_type = other DNA
cacggtagttcacctcccttcgttaggaattgcggaggtgattctgaatg

SEQ ID NO: 55805 - DNA, 50 bp, synthetic construct
  source 1..50: mol_type = other DNA
ttccgctgatttcggcctgcatatcgagaagcagtgcggggagcagtcgc

SEQ ID NO: 55806 - DNA, 50 bp, synthetic construct
  source 1..50: mol_type = other DNA
gataaaatacagtcggagacacagctctgtacctgtatctgtatctgaga

SEQ ID NO: 55807 - DNA, 50 bp, synthetic construct
  source 1..50: mol_type = other DNA
ctttttgatcttggcaatggtctcctgaccagatagatatggacggtcag

SEQ ID NO: 55808 - DNA, 50 bp, synthetic construct
  source 1..50: mol_type = other DNA
attggattatcaaaattttcagttatatgtgactctttagaaaatacaac

SEQ ID NO: 55809 - DNA, 50 bp, synthetic construct
  source 1..50: mol_type = other DNA
ctggaaaatagtcgttgacctatccctttccgtcaacgattatatatcca

SEQ ID NO: 55810 - DNA, 50 bp, synthetic construct
  source 1..50: mol_type = other DNA
gcatatatgactacattcatggtcttgtccatgactgcctggaagtctgc

SEQ ID NO: 55811 - DNA, 50 bp, synthetic construct
  source 1..50: mol_type = other DNA
tgttgtactatctcatacgctcctgtaggtgcattatagttagtacaaca

SEQ ID NO: 55812 - DNA, 50 bp, synthetic construct
  source 1..50: mol_type = other DNA
taataatacgatgtttgttaatagatgtaagatgagaaaagtaataattt

SEQ ID NO: 55813 - DNA, 50 bp, synthetic construct
  source 1..50: mol_type = other DNA
agaatggttttaaatcttcaggagagtaaatgatgaattaaccaataaat

SEQ ID NO: 55814 - DNA, 50 bp, synthetic construct
  source 1..50: mol_type = other DNA
tgatataatatatgtgtattaaaaatcattattatttatatattccatca

SEQ ID NO: 55815 - DNA, 50 bp, synthetic construct
  source 1..50: mol_type = other DNA
gccatgaaaagcccctttccccaggccagcttgtggcgggggcatatggc

SEQ ID NO: 55816 - DNA, 50 bp, synthetic construct
  source 1..50: mol_type = other DNA
cagtaattattaacatacatattattgcattcatctaaaaaaatttctaa

SEQ ID NO: 55817 - DNA, 50 bp, synthetic construct
  source 1..50: mol_type = other DNA
atcacatttaaaaaattatgaattaccattctatttttttttgccttttc

SEQ ID NO: 55818 - DNA, 50 bp, synthetic construct
  source 1..50: mol_type = other DNA
ccatatataccactcctataagaatattcttataaatttggacaaggaag

SEQ ID NO: 55819 - DNA, 50 bp, synthetic construct
  source 1..50: mol_type = other DNA
tctcacttttttattatgatggcttctggacgcataataaaaatatgagc

SEQ ID NO: 55820 - DNA, 50 bp, synthetic construct
  source 1..50: mol_type = other DNA
gtagaggagccgcccgctcggcgcatggaaaccaactgcctttattgtag

SEQ ID NO: 55821 - DNA, 50 bp, synthetic construct
  source 1..50: mol_type = other DNA
ggaatatgattatctgattggtatggataccgctaatatacggaacctta

SEQ ID NO: 55822 - DNA, 50 bp, synthetic construct
  source 1..50: mol_type = other DNA
ctcctttttagtacctttgcgctaaagattgcaaacaccataaaaaagaa

SEQ ID NO: 55823 - DNA, 50 bp, synthetic construct
  source 1..50: mol_type = other DNA
tgctggggttcgtctatgttgtactagtacaacactacccaaaaacaaca

SEQ ID NO: 55824 - DNA, 50 bp, synthetic construct
  source 1..50: mol_type = other DNA
gtcgtaggaaatgtgctgtccgtaaaaagggtgtgcacattttaattatt

SEQ ID NO: 55825 - DNA, 50 bp, synthetic construct
  source 1..50: mol_type = other DNA
cccgcggtataaactacacgaagatatcaaagtccgtgataggctccccg

SEQ ID NO: 55826 - DNA, 50 bp, synthetic construct
  source 1..50: mol_type = other DNA
aacgtccgaccaaaaatccacggacgttccgtcctgtcaaggaggacgac

SEQ ID NO: 55827 - DNA, 50 bp, synthetic construct
  source 1..50: mol_type = other DNA
atttttacattatttacatacaggaggttgtattgttgcaacttatatat

SEQ ID NO: 55828 - DNA, 50 bp, synthetic construct
  source 1..50: mol_type = other DNA
tgtccgagtatgtggcagaatacgaagttgtgctgctgcatagctttatt

SEQ ID NO: 55829 - DNA, 50 bp, synthetic construct
  source 1..50: mol_type = other DNA
aggcgcaagtaagtggtgacccagtaacggttccccactgtctattgccc

SEQ ID NO: 55830 - DNA, 50 bp, synthetic construct
  source 1..50: mol_type = other DNA
cttgactttctgctgacagggtggtattgcccgaacatgaccgtatcacc

SEQ ID NO: 55831 - DNA, 50 bp, synthetic construct
  source 1..50: mol_type = other DNA
ggttcgcgcagcgctgtgcccctgcgcagttttggtagcgcgcttgaatg

SEQ ID NO: 55832 - DNA, 50 bp, synthetic construct
  source 1..50: mol_type = other DNA
gcgatagctgaccgaagatgatacaacgatcctgcccctttttgtttcgt

SEQ ID NO: 55833 - DNA, 50 bp, synthetic construct
  source 1..50: mol_type = other DNA
taataaaagagaaaattttggaaaaagttgcgaaattatctcttttttta

SEQ ID NO: 55834 - DNA, 50 bp, synthetic construct
  source 1..50: mol_type = other DNA
tacggcaccaaaaacaaactatacgataagagtagctttttgctgtcatg

SEQ ID NO: 55835 - DNA, 50 bp, synthetic construct
  source 1..50: mol_type = other DNA
tcgtcatcctcggtggaatcactctcgctggaatccaggtcggaaaacga

SEQ ID NO: 55836 - DNA, 50 bp, synthetic construct
  source 1..50: mol_type = other DNA
acagataaatccatccaaaagaatattctattttatgtcaatttacatga

SEQ ID NO: 55837 - DNA, 50 bp, synthetic construct
  source 1..50: mol_type = other DNA
tttttttgtaatcttctttctcatgcttgttcaaaaagcctgcaaaaccg

SEQ ID NO: 55838 - DNA, 50 bp, synthetic construct
  source 1..50: mol_type = other DNA
tcggcgttttgtctgccgccggtgatctacatcggcaaccagctgctcga

SEQ ID NO: 55839 - DNA, 50 bp, synthetic construct
  source 1..50: mol_type = other DNA
gtctacattcagggaattcactatctgtatctgtatctgagactgtatct

SEQ ID NO: 55840 - DNA, 50 bp, synthetic construct
  source 1..50: mol_type = other DNA
agctgggaggtgttcatgggtaagaagtttcccccaaagacagcacacct

SEQ ID NO: 55841 - DNA, 50 bp, synthetic construct
  source 1..50: mol_type = other DNA
tttcttgcctgattgtcagaatggcatagagctgattcgttaccaagagg

SEQ ID NO: 55842 - DNA, 50 bp, synthetic construct
  source 1..50: mol_type = other DNA
tacttaaataattatgaaaacagctatataacttgataattacacccttc

SEQ ID NO: 55843 - DNA, 50 bp, synthetic construct
  source 1..50: mol_type = other DNA
tatatgaataataatttaaaaataatctgttttaaattcaatatcctttg

SEQ ID NO: 55844 - DNA, 50 bp, synthetic construct
  source 1..50: mol_type = other DNA
cagccagaacaccaacgtcggcggctgcggcggggttcacttatgtgctg

SEQ ID NO: 55845 - DNA, 50 bp, synthetic construct
  source 1..50: mol_type = other DNA
ctcgccctgttgtcatgtatgcggcgcctgttacataccaaagccgcgga

SEQ ID NO: 55846 - DNA, 50 bp, synthetic construct
  source 1..50: mol_type = other DNA
tgcgcaaaatgcttgcacggcgcaaaatgatgatgtccgagtttatcgac

SEQ ID NO: 55847 - DNA, 50 bp, synthetic construct
  source 1..50: mol_type = other DNA
cttgtgcgctgagcaggatcatggtacaatgtgccggagcggatggcaca

SEQ ID NO: 55848 - DNA, 50 bp, synthetic construct
  source 1..50: mol_type = other DNA
tttgtaaaatatatttaaaattggtatttcttttcgagatagtttgcatc

SEQ ID NO: 55849 - DNA, 50 bp, synthetic construct
  source 1..50: mol_type = other DNA
caggttttctgcatcttgtttttctggaaaatccctttctgctgtcggtt

SEQ ID NO: 55850 - DNA, 50 bp, synthetic construct
  source 1..50: mol_type = other DNA
aaaatgccatgctgcgttatgccggctggaggatggcgaggtgagcattt

SEQ ID NO: 55851 - DNA, 50 bp, synthetic construct
  source 1..50: mol_type = other DNA
aaaaataaaaaaatacccaatcatcaatgaactcgtaatagttgattttt

SEQ ID NO: 55852 - DNA, 50 bp, synthetic construct
  source 1..50: mol_type = other DNA
caaatttgtccttcggtgcgcttccttcgcagggaagttattatttttct

SEQ ID NO: 55853 - DNA, 50 bp, synthetic construct
  source 1..50: mol_type = other DNA
tttgtgttaatttatttgacagaaattttattcaaagctttgcggacaaa

SEQ ID NO: 55854 - DNA, 50 bp, synthetic construct
  source 1..50: mol_type = other DNA
tacttacaagatgtaatatttcactgatggaacgttttcctttgtgtggt

SEQ ID NO: 55855 - DNA, 50 bp, synthetic construct
  source 1..50: mol_type = other DNA
tcataccaacatctttcagaactgttattatccgaaaacgcttgatattc

SEQ ID NO: 55856 - DNA, 50 bp, synthetic construct
  source 1..50: mol_type = other DNA
cttatttacggagggcgcaatataaagaaatggccaaatccgtaaccaca

SEQ ID NO: 55857 - DNA, 50 bp, synthetic construct
  source 1..50: mol_type = other DNA
ctttctctgaatataaatatctttttaaactgtcttactatcagataaag

SEQ ID NO: 55858 - DNA, 50 bp, synthetic construct
  source 1..50: mol_type = other DNA
tttgtaatctttgcgcaaacaaaaaagaaaaaagccgccaaccgcaccac

SEQ ID NO: 55859 - DNA, 50 bp, synthetic construct
  source 1..50: mol_type = other DNA
catataaataggtagaaactatcatatgatagtaaatgcccataaacagc

SEQ ID NO: 55860 - DNA, 50 bp, synthetic construct
  source 1..50: mol_type = other DNA
gaatcccgcgtatttaggggcttttttcttccttattataatgcgttttt

SEQ ID NO: 55861 - DNA, 50 bp, synthetic construct
  source 1..50: mol_type = other DNA
ttttaaataattttaaattttacaaaggtcaaattttttgccctttttta

SEQ ID NO: 55862 - DNA, 50 bp, synthetic construct
  source 1..50: mol_type = other DNA
tactgcacccggaaaaagagatcggggagctgatccgggcggcccttcgt

SEQ ID NO: 55863 - DNA, 50 bp, synthetic construct
  source 1..50: mol_type = other DNA
acttgttttctgatggaacaaaataaggatctatccaaataaagaacagg

SEQ ID NO: 55864 - DNA, 50 bp, synthetic construct
  source 1..50: mol_type = other DNA
cttagaaatccaatacatataaccatgaagaacgataaaagagcctctta

SEQ ID NO: 55865 - DNA, 50 bp, synthetic construct
  source 1..50: mol_type = other DNA
taaagtataaaaatatataaatttcaagtaggtgttatttttgtacttaa

SEQ ID NO: 55866 - DNA, 50 bp, synthetic construct
  source 1..50: mol_type = other DNA
cgcgaaagcgcctccccatttttgcgcctccgccggtcggcgtgcgccag

SEQ ID NO: 55867 - DNA, 50 bp, synthetic construct
  source 1..50: mol_type = other DNA
agaaagattttaatgttctattatctacaagttagcatttaatttttata

SEQ ID NO: 55868 - DNA, 50 bp, synthetic construct
  source 1..50: mol_type = other DNA
gtggctgcggctgtgacaacggctgctctcgttgggcaataatgcggcag

SEQ ID NO: 55869 - DNA, 50 bp, synthetic construct
  source 1..50: mol_type = other DNA
cgcatctcaatggaagcattcatgattgtacttgctattattggctttca

SEQ ID NO: 55870 - DNA, 50 bp, synthetic construct
  source 1..50: mol_type = other DNA
catccggtcagtatcatcctgttccggagaagtgggaactgttcaagaca

SEQ ID NO: 55871 - DNA, 50 bp, synthetic construct
  source 1..50: mol_type = other DNA
ctattaacccataaaagtgtcttgtacaagacgatttttcctcgaaaaca

SEQ ID NO: 55872 - DNA, 50 bp, synthetic construct
  source 1..50: mol_type = other DNA
gatttctagcactttcaaggtttgagacgatcaaaaaagttctggaacaa

SEQ ID NO: 55873 - DNA, 50 bp, synthetic construct
  source 1..50: mol_type = other DNA
catacaaaagcaaaaaaatcccaactttcacatttttttctatttgtatg

SEQ ID NO: 55874 - DNA, 50 bp, synthetic construct
  source 1..50: mol_type = other DNA
tgcactgccctcttctacccattttacaaaaggagagtgatgcaaatgcc

SEQ ID NO: 55875 - DNA, 50 bp, synthetic construct
  source 1..50: mol_type = other DNA
taaattatcaaaaattcgttttgccggggacttatacacttgataattgt

SEQ ID NO: 55876 - DNA, 50 bp, synthetic construct
  source 1..50: mol_type = other DNA
ttccctctctgttcattctgtcaccttgcttagaaatgacagtcagacat

SEQ ID NO: 55877 - DNA, 50 bp, synthetic construct
  source 1..50: mol_type = other DNA
aagaacttgacagcaaaaacttttatactcttttttacatacattttcac

SEQ ID NO: 55878 - DNA, 50 bp, synthetic construct
  source 1..50: mol_type = other DNA
aacgcccattgcagtatagggcgttaagcgcatatatgcttatggtaatt

SEQ ID NO: 55879 - DNA, 50 bp, synthetic construct
  source 1..50: mol_type = other DNA
gcgtcatatcgcaaggggatgtgatgcgcgcatgttctgcgacattcggg

SEQ ID NO: 55880 - DNA, 50 bp, synthetic construct
  source 1..50: mol_type = other DNA
ccgggcatcctctatcatctgcataactgggctatcgcgaggacaagtcc

SEQ ID NO: 55881 - DNA, 50 bp, synthetic construct
  source 1..50: mol_type = other DNA
atcagtatttgttttaatatctaacgttggagattaaagacgcaatgtta

SEQ ID NO: 55882 - DNA, 50 bp, synthetic construct
  source 1..50: mol_type = other DNA
gcacaagccgccggagggcgcgccggtcagcggcatcctgacagcagcga

SEQ ID NO: 55883 - DNA, 50 bp, synthetic construct
  source 1..50: mol_type = other DNA
tattaagatgtaatattataccataatgtatacaatgttttatctagatt

SEQ ID NO: 55884 - DNA, 50 bp, synthetic construct
  source 1..50: mol_type = other DNA
agacttattatattttttagaattataattatattataatcaaatatagt

SEQ ID NO: 55885 - DNA, 50 bp, synthetic construct
  source 1..50: mol_type = other DNA
caacacccaatcgacgccaagtgcaagcacgtggaggtgattgtttgttt

SEQ ID NO: 55886 - DNA, 50 bp, synthetic construct
  source 1..50: mol_type = other DNA
taccagatctacgaatcttacgatactccgaaagcaccgttatttcggca

SEQ ID NO: 55887 - DNA, 50 bp, synthetic construct
  source 1..50: mol_type = other DNA
attttcctttttatttatatttattaataaaatcaaatataaaggagtga

SEQ ID NO: 55888 - DNA, 50 bp, synthetic construct
  source 1..50: mol_type = other DNA
aataaagatctaaccttttcataaatttacgatgaatgtagccatgtatt

SEQ ID NO: 55889 - DNA, 50 bp, synthetic construct
  source 1..50: mol_type = other DNA
gtgcaggcgatctacaacattcccgcaggaagttgatatatcgccgtaca

SEQ ID NO: 55890 - DNA, 50 bp, synthetic construct
  source 1..50: mol_type = other DNA
gtttattttgaaagcaaaatatttataaaaatcacaaaaaaataatacgg

SEQ ID NO: 55891 - DNA, 50 bp, synthetic construct
  source 1..50: mol_type = other DNA
caatcgaattaattgatgagatgaagcgaaatttataagtaattgacttg

SEQ ID NO: 55892 - DNA, 50 bp, synthetic construct
  source 1..50: mol_type = other DNA
tattgaactcaagagataagtgaataagtaaaccggacaatacagcactt

SEQ ID NO: 55893 - DNA, 50 bp, synthetic construct
  source 1..50: mol_type = other DNA
gcggatagaagaatcattcttcttgaaaaaagacttgctattcttggggt

SEQ ID NO: 55894 - DNA, 50 bp, synthetic construct
  source 1..50: mol_type = other DNA
acttatctagtgaatatgaaaaatataattaacgaaggagtgatataaaa

SEQ ID NO: 55895 - DNA, 50 bp, synthetic construct
  source 1..50: mol_type = other DNA
gggaaagcctttcatccggtatgcggatttttatggcgaaattctataag

SEQ ID NO: 55896 - DNA, 50 bp, synthetic construct
  source 1..50: mol_type = other DNA
ctgccagataaattttcagtaagaattacaaaagaaattttcaaagaaag

SEQ ID NO: 55897 - DNA, 50 bp, synthetic construct
  source 1..50: mol_type = other DNA
atttattcgacatcatattattgaaaccagaaaggcggtgtcggcaaaac

SEQ ID NO: 55898 - DNA, 50 bp, synthetic construct
  source 1..50: mol_type = other DNA
acaaatattcaaaagtgtgtaaatcgtttttcatcaaaatcaatatcatt

SEQ ID NO: 55899 - DNA, 50 bp, synthetic construct
  source 1..50: mol_type = other DNA
aaatactcttaaatatagtatttccagaaatactatttttaaataaatca

SEQ ID NO: 55900 - DNA, 50 bp, synthetic construct
  source 1..50: mol_type = other DNA
atgttagaaaacggtgttatatcagatgaagtaccatctttttcccttta

SEQ ID NO: 55901 - DNA, 50 bp, synthetic construct
  source 1..50: mol_type = other DNA
cagttcctctgcatgttcatcaatttgttgatatacattatatataactt

SEQ ID NO: 55902 - DNA, 50 bp, synthetic construct
  source 1..50: mol_type = other DNA
gatttgtattcatgtctgctctccctggttctcatagcttaatagctgtt

SEQ ID NO: 55903 - DNA, 50 bp, synthetic construct
  source 1..50: mol_type = other DNA
tctgaatttgtgaaatcaagatccgtggaaaccgaggaacctgtcccgga

SEQ ID NO: 55904 - DNA, 50 bp, synthetic construct
  source 1..50: mol_type = other DNA
ctaccttagatgtaacagcattttttctgctgctatatcatctacaacag

SEQ ID NO: 55905 - DNA, 50 bp, synthetic construct
  source 1..50: mol_type = other DNA
ctacctatgattaattttttctttaaaaagaaaaaatggaagaaatgtta

SEQ ID NO: 55906 - DNA, 50 bp, synthetic construct
  source 1..50: mol_type = other DNA
ctgcaacgtaattttatcatgttcaaaaatccaatataattcttctgttc

SEQ ID NO: 55907 - DNA, 50 bp, synthetic construct
  source 1..50: mol_type = other DNA
tgtaatgggtaaaaatattcaaataaattgaatatttttccaaaattttc

SEQ ID NO: 55908 - DNA, 50 bp, synthetic construct
  source 1..50: mol_type = other DNA
cctatccacagatcgccatcacccccccgcgatggcaatgtgtgacccgt

SEQ ID NO: 55909 - DNA, 50 bp, synthetic construct
  source 1..50: mol_type = other DNA
tttaaatattcttccatcaaaagcaaaaattttatgcttgattattaaaa

SEQ ID NO: 55910 - DNA, 50 bp, synthetic construct
  source 1..50: mol_type = other DNA
agtctatttgccacccttttgccaccctacaaaatggcggcatggtcttg

SEQ ID NO: 55911 - DNA, 50 bp, synthetic construct
  source 1..50: mol_type = other DNA
ctggattatcccactctacttactttagtatttcttctcgtgtagaatta

SEQ ID NO: 55912 - DNA, 50 bp, synthetic construct
  source 1..50: mol_type = other DNA
gcagaaccagaccctcgttatcaccgatcatatagaattgctggtgttcg

SEQ ID NO: 55913 - DNA, 50 bp, synthetic construct
  source 1..50: mol_type = other DNA
taggcattgtgcttgctcctctctaatcacagcaagtgtgacgattcctg

SEQ ID NO: 55914 - DNA, 50 bp, synthetic construct
  source 1..50: mol_type = other DNA
cctttgcgtccgagtagtccgtccagcaacacgccgcttctgcgcggcca

SEQ ID NO: 55915 - DNA, 50 bp, synthetic construct
  source 1..50: mol_type = other DNA
gcggccttttcgttttgtttcttttgacaaaaacaaattggaatgatata

SEQ ID NO: 55916 - DNA, 50 bp, synthetic construct
  source 1..50: mol_type = other DNA
tcattgccattgatggagattttcagcaaaatcggcatcaaaacggcggc

SEQ ID NO: 55917 - DNA, 50 bp, synthetic construct
  source 1..50: mol_type = other DNA
taaaaaaagagataatttcgcaactttttccaaaattttctcttttatta

SEQ ID NO: 55918 - DNA, 50 bp, synthetic construct
  source 1..50: mol_type = other DNA
tcctttctttaaccagcaaaatatccttctttcgctaccagaaagaaggt

SEQ ID NO: 55919 - DNA, 50 bp, synthetic construct
  source 1..50: mol_type = other DNA
gcttggccaggaccatcagactctgaggaaaatcatggataataataaaa

SEQ ID NO: 55920 - DNA, 50 bp, synthetic construct
  source 1..50: mol_type = other DNA
tttctttttgcgaggcataaataccagcccttgcaaaaccataaaaaaat

SEQ ID NO: 55921 - DNA, 50 bp, synthetic construct
  source 1..50: mol_type = other DNA
taaattatacggtctgcgagaggttctccatcaaaacatggtatatacat

SEQ ID NO: 55922 - DNA, 50 bp, synthetic construct
  source 1..50: mol_type = other DNA
ttctacgaatccctaaaaagcgggtgcgtacttttagcagattatgaaag

SEQ ID NO: 55923 - DNA, 50 bp, synthetic construct
  source 1..50: mol_type = other DNA
ttgtttttgggtagtgttgtactaatagatagattagaaaacaaaaaaac

SEQ ID NO: 55924 - DNA, 50 bp, synthetic construct
  source 1..50: mol_type = other DNA
cacgccgctgaaaagcggcgtatttataggagccggaaaggagcagatat

SEQ ID NO: 55925 - DNA, 50 bp, synthetic construct
  source 1..50: mol_type = other DNA
tgaggaacaccgcaaaatcgtagagctggaaaatgcactggaggcttgta

SEQ ID NO: 55926 - DNA, 50 bp, synthetic construct
  source 1..50: mol_type = other DNA
tcatattatttttttatgattgttatgaaaatctctgttattttttacgt

SEQ ID NO: 55927 - DNA, 50 bp, synthetic construct
  source 1..50: mol_type = other DNA
ataaatcataaggagaaaaagatttaaatccgcaagggtttattttttat

SEQ ID NO: 55928 - DNA, 50 bp, synthetic construct
  source 1..50: mol_type = other DNA
tttggaaaaatattcaattttggaattatctaaagctttatttttaaaaa

SEQ ID NO: 55929 - DNA, 50 bp, synthetic construct
  source 1..50: mol_type = other DNA
gatgccggattcataattccgccgtagagccagcgcaccgtcgccgcctc

SEQ ID NO: 55930 - DNA, 50 bp, synthetic construct
  source 1..50: mol_type = other DNA
gggatgctccatcgcagcaaggatgttcaacggctgctttgcctgttcct

SEQ ID NO: 55931 - DNA, 50 bp, synthetic construct
  source 1..50: mol_type = other DNA
attcatagtaatctgctcgctgtgaagaaggcggccagtttatttctaat

SEQ ID NO: 55932 - DNA, 50 bp, synthetic construct
  source 1..50: mol_type = other DNA
gttttacctttttccgtaggattttcccatccaaaacaaaaaggcccacc

SEQ ID NO: 55933 - DNA, 50 bp, synthetic construct
  source 1..50: mol_type = other DNA
tttttttcgtccggagtggagcaagcttcatcgaaaccgagaaacgggat

SEQ ID NO: 55934 - DNA, 50 bp, synthetic construct
  source 1..50: mol_type = other DNA
tttttgtcgttcatagaaagttattaaagactttttaaataccgtttaaa

SEQ ID NO: 55935 - DNA, 50 bp, synthetic construct
  source 1..50: mol_type = other DNA
tcccagctttccggcgtggaggaataacatcagtgtcctgaaaggagggc

SEQ ID NO: 55936 - DNA, 50 bp, synthetic construct
  source 1..50: mol_type = other DNA
cttaaacacagttatcgctagattcagcgggcgcgtgaactggcgctccg

SEQ ID NO: 55937 - DNA, 50 bp, synthetic construct
  source 1..50: mol_type = other DNA
cgagtgtgatgtatgaggcgagggcgccccgttgtgtgacactataggca

SEQ ID NO: 55938 - DNA, 50 bp, synthetic construct
  source 1..50: mol_type = other DNA
tatcataatatgataccaaccacttttgcatccacaaacatagtatgatt

SEQ ID NO: 55939 - DNA, 50 bp, synthetic construct
  source 1..50: mol_type = other DNA
aggaaaatggggtgatctggaatttccaatccagattataccatttcagc

SEQ ID NO: 55940 - DNA, 50 bp, synthetic construct
  source 1..50: mol_type = other DNA
ggctggtgctttatccatacacttataaacaaatcatcaaacctattgat

SEQ ID NO: 55941 - DNA, 50 bp, synthetic construct
  source 1..50: mol_type = other DNA
tcattttttcactcacatgcttcttcacccacagttgagttattaacgta

SEQ ID NO: 55942 - DNA, 50 bp, synthetic construct
  source 1..50: mol_type = other DNA
tattcatcactctaaaccgaatttatacttttcgttctgaaggatgctgg

SEQ ID NO: 55943 - DNA, 50 bp, synthetic construct
  source 1..50: mol_type = other DNA
agatggaaaggctgttgtagatgatatcatcagatggagcataaccagcg

SEQ ID NO: 55944 - DNA, 50 bp, synthetic construct
  source 1..50: mol_type = other DNA
ctgaaaaaaaacatacggaaaatggaaattttctgtgttcgcttttttct

SEQ ID NO: 55945 - DNA, 50 bp, synthetic construct
  source 1..50: mol_type = other DNA
tgatgtcaattccggggagaatttttcgatttccagcggaatttaacggg

SEQ ID NO: 55946 - DNA, 50 bp, synthetic construct
  source 1..50: mol_type = other DNA
actggaaagcgtaaaatggaattatctctttttatctgtcatttttcagt

SEQ ID NO: 55947 - DNA, 50 bp, synthetic construct
  source 1..50: mol_type = other DNA
gaaggtttaatttttattatatctattttaattacaacatttttgtatta

SEQ ID NO: 55948 - DNA, 50 bp, synthetic construct
  source 1..50: mol_type = other DNA
atctcaaaaaagcccgtaaatacgcttgataaatacagcttttagagtga

SEQ ID NO: 55949 - DNA, 50 bp, synthetic construct
  source 1..50: mol_type = other DNA
catagtatactgaaaaaaatcgcgaaagcgaggttatttgatgggaaatg

SEQ ID NO: 55950 - DNA, 50 bp, synthetic construct
  source 1..50: mol_type = other DNA
tcgggctggtctatcatgggtataactatacccattttaacacagaaatg

SEQ ID NO: 55951 - DNA, 50 bp, synthetic construct
  source 1..50: mol_type = other DNA
gctatgggtttattggtggaatagagaaaagccaccaatcaaggaagtaa

SEQ ID NO: 55952 - DNA, 50 bp, synthetic construct
  source 1..50: mol_type = other DNA
ttgaatgaaagggaggaaagatatatctaattcaccaacctttccttcaa

SEQ ID NO: 55953 - DNA, 50 bp, synthetic construct
  source 1..50: mol_type = other DNA
tttttgataaaatgggtacagaaaaattttagcggttagattatcaatct

SEQ ID NO: 55954 - DNA, 50 bp, synthetic construct
  source 1..50: mol_type = other DNA
attgtaagcaaaaaaaatatcgtaaaggctgtattttttatgcttaaaac

SEQ ID NO: 55955 - DNA, 50 bp, synthetic construct
  source 1..50: mol_type = other DNA
ggctgccgccgttgttcttttcaaggtacaaaaatcatcaggccgaagag

SEQ ID NO: 55956 - DNA, 50 bp, synthetic construct
  source 1..50: mol_type = other DNA
cacttccatacgcggcctttgctatcacgctggtgcgccagatggaagag

SEQ ID NO: 55957 - DNA, 50 bp, synthetic construct
  source 1..50: mol_type = other DNA
tgcaagcgcacgcgcgatcgcgacacgttgcatccgctcttgcgcttact

SEQ ID NO: 55958 - DNA, 50 bp, synthetic construct
  source 1..50: mol_type = other DNA
ctgtttacggacggtctttttcttgcaatgcaatacagcgccctacatca

SEQ ID NO: 55959 - DNA, 50 bp, synthetic construct
  source 1..50: mol_type = other DNA
catgtgaccctcctaaaaatttcgtccgaaattcagatctacccggagcg

SEQ ID NO: 55960 - DNA, 50 bp, synthetic construct
  source 1..50: mol_type = other DNA
acaacattggttgtatttatgattataatggagtatgtaaactatgttgg

SEQ ID NO: 55961 - DNA, 50 bp, synthetic construct
  source 1..50: mol_type = other DNA
tataatctgttttgtactaagtattcgtatctttccaaaaactctatatc

SEQ ID NO: 55962 - DNA, 50 bp, synthetic construct
  source 1..50: mol_type = other DNA
ggacgaaccgtcattgagcacggcgaatcgtgatcaatgcattttccgag

SEQ ID NO: 55963 - DNA, 50 bp, synthetic construct
  source 1..50: mol_type = other DNA
gatatctaccccaaaatccaatagaaaattcatttattagcagcggccca

SEQ ID NO: 55964 - DNA, 50 bp, synthetic construct
  source 1..50: mol_type = other DNA
aggttcgccgtagcgggcgtaggaattactatgccaaaataaaggagcgt

SEQ ID NO: 55965 - DNA, 50 bp, synthetic construct
  source 1..50: mol_type = other DNA
cgctggtgcagagatacactggcggtagacacggttgatctgcaccatcg

SEQ ID NO: 55966 - DNA, 50 bp, synthetic construct
  source 1..50: mol_type = other DNA
actactaacacgttactaacaaagttgcatggcaaaaataacggtcacac

SEQ ID NO: 55967 - DNA, 50 bp, synthetic construct
  source 1..50: mol_type = other DNA
agaaaggaaacaataatgaacaatactttatccattgttgtttcctttcg

SEQ ID NO: 55968 - DNA, 50 bp, synthetic construct
  source 1..50: mol_type = other DNA
caaacaacgtgcaggtgattccggcaacgaccagacactgttcgttccga

SEQ ID NO: 55969 - DNA, 50 bp, synthetic construct
  source 1..50: mol_type = other DNA
gtagatcactgcctttttcatgggagtccatgaaaaaaatcgtgattctt

SEQ ID NO: 55970 - DNA, 50 bp, synthetic construct
  source 1..50: mol_type = other DNA
tttttcacgctgcagctttactcatatcagctccgctgctgcatacacaa

SEQ ID NO: 55971 - DNA, 50 bp, synthetic construct
  source 1..50: mol_type = other DNA
gtttgaaaggatcatcaaacataatctgctgtttgatgcgttccagttcc

SEQ ID NO: 55972 - DNA, 50 bp, synthetic construct
  source 1..50: mol_type = other DNA
cccggtttctgataatagaatctcttttgattttataaccaaacaatgtc

SEQ ID NO: 55973 - DNA, 50 bp, synthetic construct
  source 1..50: mol_type = other DNA
gtattgttgtatctggtatgacatatataccttgccagacggaacagaac

SEQ ID NO: 55974 - DNA, 50 bp, synthetic construct
  source 1..50: mol_type = other DNA
tttgtggattttgatgatgatagaaatgaatcatatagaaaactaagcaa

SEQ ID NO: 55975 - DNA, 50 bp, synthetic construct
  source 1..50: mol_type = other DNA
taaaatttattcgtagagtttacagccttccaggccatgaatcagcttcg

SEQ ID NO: 55976 - DNA, 50 bp, synthetic construct
  source 1..50: mol_type = other DNA
ccaaaagtgtggtacactcatggggcacccggagacacctgcactgaact

SEQ ID NO: 55977 - DNA, 50 bp, synthetic construct
  source 1..50: mol_type = other DNA
acactcctatgttattgtatttaaatttggttttcaagaaattggaaatt

SEQ ID NO: 55978 - DNA, 50 bp, synthetic construct
  source 1..50: mol_type = other DNA
aatcatgatttgttatcttcatctatatataaatattacatctaatgatt

SEQ ID NO: 55979 - DNA, 50 bp, synthetic construct
  source 1..50: mol_type = other DNA
tacactactaaacaagaaaggatatctaagctatcttcttttctagtgta

SEQ ID NO: 55980 - DNA, 50 bp, synthetic construct
  source 1..50: mol_type = other DNA
attgtagcagattgttgcaatacttcactagcggtactgctgttacaaat

SEQ ID NO: 55981 - DNA, 50 bp, synthetic construct
  source 1..50: mol_type = other DNA
aatgttatattttgattccacaagaattttacagcgtttccgataaatcc

SEQ ID NO: 55982 - DNA, 50 bp, synthetic construct
  source 1..50: mol_type = other DNA
gtgataaatatcagcagagatatgctacatcaattcacgagatgattggt

SEQ ID NO: 55983 - DNA, 50 bp, synthetic construct
  source 1..50: mol_type = other DNA
gaccttattttcatctgaaagcaaatatgctttcatatgcttgaaaggac

SEQ ID NO: 55984 - DNA, 50 bp, synthetic construct
  source 1..50: mol_type = other DNA
aaccttttccggactgccgaaaaaaggagcccggcaggcaggaacccgtt

SEQ ID NO: 55985 - DNA, 50 bp, synthetic construct
  source 1..50: mol_type = other DNA
tttggtgatggaataggatttggcggatcaattactattttccctcccgc

SEQ ID NO: 55986 - DNA, 50 bp, synthetic construct
  source 1..50: mol_type = other DNA
cagccggacgtcgtgggcgcggtcacgaccggcgtgacgcggagggaatg

SEQ ID NO: 55987 - DNA, 50 bp, synthetic construct
  source 1..50: mol_type = other DNA
ccaccttatgtatcttgttgccatagataacaacaagatacccaaccaaa

SEQ ID NO: 55988 - DNA, 50 bp, synthetic construct
  source 1..50: mol_type = other DNA
gggtcgttcccgcctcgtataaacatgttctgtgcagccgggaccggcag

SEQ ID NO: 55989 - DNA, 50 bp, synthetic construct
  source 1..50: mol_type = other DNA
ttgtcattttcaatggttgtcaattaagcaactttagccttttcacgtcg

SEQ ID NO: 55990 - DNA, 50 bp, synthetic construct
  source 1..50: mol_type = other DNA
tatattctttttgtggtcacatgatatcattactctataaaatatctatt

SEQ ID NO: 55991 - DNA, 50 bp, synthetic construct
  source 1..50: mol_type = other DNA
aatatttataacatcttgagggtaattgccctcaatatgatgtacatatg

SEQ ID NO: 55992 - DNA, 50 bp, synthetic construct
  source 1..50: mol_type = other DNA
taattaaatattttcttatctatatttatagataaagcaatcaataattt

SEQ ID NO: 55993 - DNA, 50 bp, synthetic construct
  source 1..50: mol_type = other DNA
taaccggttatgcgggaaaagaacatgttccaaacccgcataaataaagg

SEQ ID NO: 55994 - DNA, 50 bp, synthetic construct
  source 1..50: mol_type = other DNA
ccgtgtttccacggatcaggaagaccatattaacttccgtggaatacagg

SEQ ID NO: 55995 - DNA, 50 bp, synthetic construct
  source 1..50: mol_type = other DNA
gctggctgctctggccgtcaatatccatattaacttccgtggaatacagg

SEQ ID NO: 55996 - DNA, 50 bp, synthetic construct
  source 1..50: mol_type = other DNA
catccagaacgaagcctatcgcggcgttgcgctttcgtctaatctgcggg

SEQ ID NO: 55997 - DNA, 50 bp, synthetic construct
  source 1..50: mol_type = other DNA
gttatgctgccaagcctaaatgctatttagaaatcgcttggaagctcgtt

SEQ ID NO: 55998 - DNA, 50 bp, synthetic construct
  source 1..50: mol_type = other DNA
ataatctcggctaaaaacggagagaattctcagttttggtaggctctcca

SEQ ID NO: 55999 - DNA, 50 bp, synthetic construct
  source 1..50: mol_type = other DNA
cggtttcggacatcagctccatgaaatcagagttaatatgtccgatacca

SEQ ID NO: 56000 - DNA, 50 bp, synthetic construct
  source 1..50: mol_type = other DNA
gtaatcacccctcacagaaaagaacccggcttctttattacggccttgcc

SEQ ID NO: 56001 - DNA, 50 bp, synthetic construct
  source 1..50: mol_type = other DNA
atccggaaggagataatgttccagacacgaaacgcaataagccgcaggag

SEQ ID NO: 56002 - DNA, 50 bp, synthetic construct
  source 1..50: mol_type = other DNA
gacgctgcggttagaaggaaagctcagggtggcttcctataacatcagtg

SEQ ID NO: 56003 - DNA, 50 bp, synthetic construct
  source 1..50: mol_type = other DNA
tgtatcattcaatgcgattatgaaatctcataagctcgttaggtggaaaa

SEQ ID NO: 56004 - DNA, 50 bp, synthetic construct
  source 1..50: mol_type = other DNA
cacactcctatgtaattgtattgaaacaaatacaacttcagtttactgat

SEQ ID NO: 56005 - DNA, 50 bp, synthetic construct
  source 1..50: mol_type = other DNA
agcagtggttgatgaagaacgggctgtttacttgagcaaattcgactgct

SEQ ID NO: 56006 - DNA, 50 bp, synthetic construct
  source 1..50: mol_type = other DNA
catgctaacataaaaacaaataaatatttcactgtttacttgagcaaatt

SEQ ID NO: 56007 - DNA, 50 bp, synthetic construct
  source 1..50: mol_type = other DNA
gggcctttagtgaaatacttactaattagcaacagtttctataaaggaaa

SEQ ID NO: 56008 - DNA, 50 bp, synthetic construct
  source 1..50: mol_type = other DNA
tggcggtttctttcttctgccagtcgactgtggtttgatgaccaccgccg

SEQ ID NO: 56009 - DNA, 50 bp, synthetic construct
  source 1..50: mol_type = other DNA
ttttagtggacttgaacctgcgtaatttttcattgtatttttcaacaaaa

SEQ ID NO: 56010 - DNA, 50 bp, synthetic construct
  source 1..50: mol_type = other DNA
ctgattaagagtcaggtgctctgccagctgggcctctgtcggcggatatg

SEQ ID NO: 56011 - DNA, 50 bp, synthetic construct
  source 1..50: mol_type = other DNA
cagcccgatggccgatgcggaacgcggcctccgcagcgtacacgggcgtg

SEQ ID NO: 56012 - DNA, 50 bp, synthetic construct
  source 1..50: mol_type = other DNA
cgcacctgttcaatgaattcactggaaaatcaatgacaaaaacagccgtc

SEQ ID NO: 56013 - DNA, 50 bp, synthetic construct
  source 1..50: mol_type = other DNA
acaggcagctatcaagaagcacaacgcagtttttcttgtgtattgcgaat

SEQ ID NO: 56014 - DNA, 50 bp, synthetic construct
  source 1..50: mol_type = other DNA
tgaaatccgagagcatttcttcaaattcctgtcaatattcatccttttat

SEQ ID NO: 56015 - DNA, 50 bp, synthetic construct
  source 1..50: mol_type = other DNA
cagccaagagaagtactacaaaatatttttccaaaattttctcttttatt

SEQ ID NO: 56016 - DNA, 50 bp, synthetic construct
  source 1..50: mol_type = other DNA
ttatgcgggtttggaacatctctcatgtaacatgttcttttcccgcataa

SEQ ID NO: 56017 - DNA, 50 bp, synthetic construct
  source 1..50: mol_type = other DNA
gcttgctgatgcggtactcaataaattgaatgcttaggttgaccgcaaaa

SEQ ID NO: 56018 - DNA, 50 bp, synthetic construct
  source 1..50: mol_type = other DNA
tacaatctgcgatacctttcacctttattaaattacacaacctttttgca

SEQ ID NO: 56019 - DNA, 50 bp, synthetic construct
  source 1..50: mol_type = other DNA
tgcatactgcagagtatccacggatctgtttgctcggatggccgggtgca

SEQ ID NO: 56020 - DNA, 50 bp, synthetic construct
  source 1..50: mol_type = other DNA
ttcatgatctcgcttttgttatggctgcaagggaagagcaggactgagaa

SEQ ID NO: 56021 - DNA, 50 bp, synthetic construct
  source 1..50: mol_type = other DNA
gagtctgttttttctttttccgtcatgacgcttccgagagtaacaggtgt

SEQ ID NO: 56022 - DNA, 50 bp, synthetic construct
  source 1..50: mol_type = other DNA
aaaaaagactttggccagttactgtcaaaaaatctcatttgcaccttttc

SEQ ID NO: 56023 - DNA, 50 bp, synthetic construct
  source 1..50: mol_type = other DNA
cgcatctcaatggatgcattcatgattatacttgctattattggctttca

SEQ ID NO: 56024 - DNA, 50 bp, synthetic construct
  source 1..50: mol_type = other DNA
ttctatcaaactataaatgtattctgtgcagtatttattcctttgcttgt

SEQ ID NO: 56025 - DNA, 50 bp, synthetic construct
  source 1..50: mol_type = other DNA
gatgcaatgcaggtacttggagattaagtttccttaatctgcttgacagt

SEQ ID NO: 56026 - DNA, 50 bp, synthetic construct
  source 1..50: mol_type = other DNA
tgcccgaaagccttggtggactccgagcccccccccgctgccttcatcgg

SEQ ID NO: 56027 - DNA, 50 bp, synthetic construct
  source 1..50: mol_type = other DNA
aacaggatctattgaaattaaaggatacccttttttacatacatttacac

SEQ ID NO: 56028 - DNA, 50 bp, synthetic construct
  source 1..50: mol_type = other DNA
aacctggcagattattttgaaattgatattatgagaaaataaaccaggtt

SEQ ID NO: 56029 - DNA, 50 bp, synthetic construct
  source 1..50: mol_type = other DNA
ttttgggactgatgaataaatcccatttattttacataatacatcaaaaa

SEQ ID NO: 56030 - DNA, 50 bp, synthetic construct
  source 1..50: mol_type = other DNA
aagaattatattggatttttaaagatttttacattctttatatatctcta

SEQ ID NO: 56031 - DNA, 50 bp, synthetic construct
  source 1..50: mol_type = other DNA
cgcagtcatatccggaaccgccgatatttacatctctatcctgttctgat

SEQ ID NO: 56032 - DNA, 50 bp, synthetic construct
  source 1..50: mol_type = other DNA
cgatgtttttcttaaggtgtctccggagaagctggataagaaagcggtca

SEQ ID NO: 56033 - DNA, 50 bp, synthetic construct
  source 1..50: mol_type = other DNA
tatcacttcctcttgcaactgccctgctgcagtcttactcatatcgaatc

SEQ ID NO: 56034 - DNA, 50 bp, synthetic construct
  source 1..50: mol_type = other DNA
atagtcctttatatatccagtgttatgttcctgcatagaaaaagattgca

SEQ ID NO: 56035 - DNA, 50 bp, synthetic construct
  source 1..50: mol_type = other DNA
taaaaaagggtataaaaataacagccatattattataatataaaattttg

SEQ ID NO: 56036 - DNA, 50 bp, synthetic construct
  source 1..50: mol_type = other DNA
gatatcggcaatgtgcagatccgatatccaatctctttgatcactagatc

SEQ ID NO: 56037 - DNA, 50 bp, synthetic construct
  source 1..50: mol_type = other DNA
tttaccctaattgtatgtatggattcaaccatggtgacaattagggtaaa

SEQ ID NO: 56038 - DNA, 50 bp, synthetic construct
  source 1..50: mol_type = other DNA
taccccagcttgcgtattgcaaaccggtttacaaggggctacaagcggta

SEQ ID NO: 56039 - DNA, 50 bp, synthetic construct
  source 1..50: mol_type = other DNA
gctttaatttctaaaattgataagatcttatactatcacataaaaaaaag

SEQ ID NO: 56040 - DNA, 50 bp, synthetic construct
  source 1..50: mol_type = other DNA
tccggtcagacatttttgcaatgcatcggagagccaaataggtgatatgt

SEQ ID NO: 56041 - DNA, 50 bp, synthetic construct
  source 1..50: mol_type = other DNA
ctaataatcttatccgacaacagccggcccaggccggcggagcatttctg

SEQ ID NO: 56042 - DNA, 50 bp, synthetic construct
  source 1..50: mol_type = other DNA
tgttggtccaggagacgggattttttcgaatccctaccgggtcaccaaac

SEQ ID NO: 56043 - DNA, 50 bp, synthetic construct
  source 1..50: mol_type = other DNA
tatatatcactctaaatgctgaaataaaaaaaatagaagatagaactata

SEQ ID NO: 56044 - DNA, 50 bp, synthetic construct
  source 1..50: mol_type = other DNA
caggttgttacttatttgtagattttaaaaaacaaataacaaactcccca

SEQ ID NO: 56045 - DNA, 50 bp, synthetic construct
  source 1..50: mol_type = other DNA
acatggaagtgaaagaaacaaggaaagaaagatgaaaggtatcgcagatt

SEQ ID NO: 56046 - DNA, 50 bp, synthetic construct
  source 1..50: mol_type = other DNA
tggctgctctggggcatctcatcattccgtccgatgcaccggagaagtgg

SEQ ID NO: 56047 - DNA, 50 bp, synthetic construct
  source 1..50: mol_type = other DNA
ctcattgtagcagagccgcgggcggccggccgccgcagttgtacatagag

SEQ ID NO: 56048 - DNA, 50 bp, synthetic construct
  source 1..50: mol_type = other DNA
aaaggtctttagaattaatggtgtgtataccatgccatataaagaggtga

SEQ ID NO: 56049 - DNA, 50 bp, synthetic construct
  source 1..50: mol_type = other DNA
gatcatctgtatgtggaagatctggatagatgctgcacaaagtagtaaca

SEQ ID NO: 56050 - DNA, 50 bp, synthetic construct
  source 1..50: mol_type = other DNA
gcctggtttgtaatgtactgcttaataatgccgacaaataaaaacatggc

SEQ ID NO: 56051 - DNA, 50 bp, synthetic construct
  source 1..50: mol_type = other DNA
aaaggacctcctttatagaaggtcaataaatttcaaaaaggagtcttttt

SEQ ID NO: 56052 - DNA, 50 bp, synthetic construct
  source 1..50: mol_type = other DNA
ccagtgcgagtattctgtctttatccatgaaaacggtgacaaaaatcgga

SEQ ID NO: 56053 - DNA, 50 bp, synthetic construct
  source 1..50: mol_type = other DNA
actgataaacagaagcctttctttaccttagcagccttctccttgtcaat

SEQ ID NO: 56054 - DNA, 50 bp, synthetic construct
  source 1..50: mol_type = other DNA
acactataaattatttaagtttttgttaaagaacaagcacattcccgtct

SEQ ID NO: 56055 - DNA, 50 bp, synthetic construct
  source 1..50: mol_type = other DNA
aagcctttaataaaaacacaggatttttccaaaattttctcttttattat

SEQ ID NO: 56056 - DNA, 50 bp, synthetic construct
  source 1..50: mol_type = other DNA
atttgtactaacttaacactgcccacgggtagtgtcacattagtacaaca

SEQ ID NO: 56057 - DNA, 50 bp, synthetic construct
  source 1..50: mol_type = other DNA
ccgggatgtgattgaaaatgctgtgggcaggcttgtcaaagtgtacccgg

SEQ ID NO: 56058 - DNA, 50 bp, synthetic construct
  source 1..50: mol_type = other DNA
ggcgaggaggtcgttgtccttgacagcatcgggtcgacgacctctacggt

SEQ ID NO: 56059 - DNA, 50 bp, synthetic construct
  source 1..50: mol_type = other DNA
ttcgctccttattttcttgattctttgccgtcaagaaactccgtagccag

SEQ ID NO: 56060 - DNA, 50 bp, synthetic construct
  source 1..50: mol_type = other DNA
cttgacctgtctggttttcacaatgtattgtggttacggatttggccatt

SEQ ID NO: 56061 - DNA, 50 bp, synthetic construct
  source 1..50: mol_type = other DNA
atgcaggaaaaacgatacactgaatattcagtgaaatattacatcttgta

SEQ ID NO: 56062 - DNA, 50 bp, synthetic construct
  source 1..50: mol_type = other DNA
aaagaacctcatcgtctcacctcccatcaccgccagatcttaagttcttt

SEQ ID NO: 56063 - DNA, 50 bp, synthetic construct
  source 1..50: mol_type = other DNA
cagatacaggtacagagacagtgcgcgcagctcgctcccatctgcgtctg

SEQ ID NO: 56064 - DNA, 50 bp, synthetic construct
  source 1..50: mol_type = other DNA
aacgccatcctgcggcgaaccgacctgtttgattttattgagatggcatt

SEQ ID NO: 56065 - DNA, 50 bp, synthetic construct
  source 1..50: mol_type = other DNA
atctctagaaatttatatttgtgaattcacaaaataaagtgaataatggc

SEQ ID NO: 56066 - DNA, 50 bp, synthetic construct
  source 1..50: mol_type = other DNA
aggtataaatattattgtttactaaataataaataataatttttaatgat

SEQ ID NO: 56067 - DNA, 50 bp, synthetic construct
  source 1..50: mol_type = other DNA
tatcacagtggacagtccgctttttgaacagcgaggtgaaacttatgata

SEQ ID NO: 56068 - DNA, 50 bp, synthetic construct
  source 1..50: mol_type = other DNA
tgacagaacttttaaaagaaaatcctccatcagatttagcttttgtttga

SEQ ID NO: 56069 - DNA, 50 bp, synthetic construct
  source 1..50: mol_type = other DNA
cacgggccgaatagcaagaattaaaaatagaactgtctgttcggctcaaa

SEQ ID NO: 56070 - DNA, 50 bp, synthetic construct
  source 1..50: mol_type = other DNA
aaggactacgcgctgaaagacgacgttatctgtttctgtatttctatctt

SEQ ID NO: 56071 - DNA, 50 bp, synthetic construct
  source 1..50: mol_type = other DNA
tgtacaacgaacatcagcaacctcatcaaatttctgatttttttcttcta

SEQ ID NO: 56072 - DNA, 50 bp, synthetic construct
  source 1..50: mol_type = other DNA
tatcggtaaataatgtagacaaagatttgattctgcattatcacaatata

SEQ ID NO: 56073 - DNA, 50 bp, synthetic construct
  source 1..50: mol_type = other DNA
aacacgccatttggatatataatcgtgttttcatcagcaaggcgggcaat

SEQ ID NO: 56074 - DNA, 50 bp, synthetic construct
  source 1..50: mol_type = other DNA
atttcagtccattaataaattctgttgtttggatattattggaccataaa

SEQ ID NO: 56075 - DNA, 50 bp, synthetic construct
  source 1..50: mol_type = other DNA
gctagtgtttttacacatatacttttgactatatttgtatattgcaaaac

SEQ ID NO: 56076 - DNA, 50 bp, synthetic construct
  source 1..50: mol_type = other DNA
gtgaaaaattgttaaatggtaaagatctgtgcagtttacggatttatcag

SEQ ID NO: 56077 - DNA, 50 bp, synthetic construct
  source 1..50: mol_type = other DNA
ccggacagggtgttgaccttggccaccaccatccggcccagccgagcctt

SEQ ID NO: 56078 - DNA, 50 bp, synthetic construct
  source 1..50: mol_type = other DNA
aaggtaagttctgcaggcttgaacctctgcaattgcacagaacttaccta

SEQ ID NO: 56079 - DNA, 50 bp, synthetic construct
  source 1..50: mol_type = other DNA
ataattaataaaaagttcaagaccattatctaaaaatctttttcttctac

SEQ ID NO: 56080 - DNA, 50 bp, synthetic construct
  source 1..50: mol_type = other DNA
ctttcgaactatccatgacattattcataatcatattcatcctcaaaact

SEQ ID NO: 56081 - DNA, 50 bp, synthetic construct
  source 1..50: mol_type = other DNA
atgggtacaaaaataacagcgcacaaaattgctatttaacttgtagccat

SEQ ID NO: 56082 - DNA, 50 bp, synthetic construct
  source 1..50: mol_type = other DNA
agaaggaacatgatacagcttatcataagagatcttatcaggacggctct

SEQ ID NO: 56083 - DNA, 50 bp, synthetic construct
  source 1..50: mol_type = other DNA
ttttattttatcccattattcagttaaagaaatactgcagtaaaagcgaa

SEQ ID NO: 56084 - DNA, 50 bp, synthetic construct
  source 1..50: mol_type = other DNA
cattatttaattagcttcatcttctagaagatgcaacgaacgaaaaacgc

SEQ ID NO: 56085 - DNA, 50 bp, synthetic construct
  source 1..50: mol_type = other DNA
tcaatagaatccctattcttcttagtttattggtactggtattctataac

SEQ ID NO: 56086 - DNA, 50 bp, synthetic construct
  source 1..50: mol_type = other DNA
tgaaggtcttcgccatgatttcggctccgaatctctggcgttcatctggc

SEQ ID NO: 56087 - DNA, 50 bp, synthetic construct
  source 1..50: mol_type = other DNA
cttcaatatacgtaaaaatgagtataccatgcgttttacgccgtcaatga

SEQ ID NO: 56088 - DNA, 50 bp, synthetic construct
  source 1..50: mol_type = other DNA
taatataaatttaaatataagcattgtttttttattttaaatttatattt

SEQ ID NO: 56089 - DNA, 50 bp, synthetic construct
  source 1..50: mol_type = other DNA
ggtgtaatatgaccaatcgaaccatttggcactgtatcgtgcccgaaaaa

SEQ ID NO: 56090 - DNA, 50 bp, synthetic construct
  source 1..50: mol_type = other DNA
cttggggagatgtcatacgaaaagcaggagtccatctccatctcccgacg

SEQ ID NO: 56091 - DNA, 50 bp, synthetic construct
  source 1..50: mol_type = other DNA
cgccggccagcttcagctccacggtgcagtcgatagagatcttgcaccca

SEQ ID NO: 56092 - DNA, 50 bp, synthetic construct
  source 1..50: mol_type = other DNA
gaaatgtttcagcatttcttccacatggtaaaaaaattgtgaatatatct

SEQ ID NO: 56093 - DNA, 50 bp, synthetic construct
  source 1..50: mol_type = other DNA
gttattttttctatacttttcagttaacataaaagcatctaaaaaggcct

SEQ ID NO: 56094 - DNA, 50 bp, synthetic construct
  source 1..50: mol_type = other DNA
acatgtttttttaagtcttctgcatatgcagcaacttttaatttttcttt

SEQ ID NO: 56095 - DNA, 50 bp, synthetic construct
  source 1..50: mol_type = other DNA
cagcgtgtcaccgggctgccgtctatgcccggcagccgcttggcaagcat

SEQ ID NO: 56096 - DNA, 50 bp, synthetic construct
  source 1..50: mol_type = other DNA
cctggacacaataaaatagcttaaccttagacaagtttattgtatcatag

SEQ ID NO: 56097 - DNA, 50 bp, synthetic construct
  source 1..50: mol_type = other DNA
acaatctgccttgtaatgatttctatataaagacaaataaggcagataac

SEQ ID NO: 56098 - DNA, 50 bp, synthetic construct
  source 1..50: mol_type = other DNA
ttgagaaagcatatatattaggtttacacctaatatataaaagtggctat

SEQ ID NO: 56099 - DNA, 50 bp, synthetic construct
  source 1..50: mol_type = other DNA
ggaatatagagattccacttgccatgttcaaataaccatgtctctattac

SEQ ID NO: 56100 - DNA, 50 bp, synthetic construct
  source 1..50: mol_type = other DNA
ccggcagcagtggcacttactccggaaggagtaaaaccgattacgatacg

SEQ ID NO: 56101 - DNA, 50 bp, synthetic construct
  source 1..50: mol_type = other DNA
tatgaggctcttttatagttttccatggttatatgtattggatttctaag

SEQ ID NO: 56102 - DNA, 50 bp, synthetic construct
  source 1..50: mol_type = other DNA
tatcaaacattccgcttttaggcgaacgccgctgagctgtttgtttgccc

SEQ ID NO: 56103 - DNA, 50 bp, synthetic construct
  source 1..50: mol_type = other DNA
tgagccggcagatcgaccgctatcagctcagtggtagagccaccggctca

SEQ ID NO: 56104 - DNA, 50 bp, synthetic construct
  source 1..50: mol_type = other DNA
ttttaaagggatttagttcctctgaattatggaggtagaaaagatgaaaa

SEQ ID NO: 56105 - DNA, 50 bp, synthetic construct
  source 1..50: mol_type = other DNA
tagattatacttacaagatgtaatatattaaatgtaacagatatgagagc

SEQ ID NO: 56106 - DNA, 50 bp, synthetic construct
  source 1..50: mol_type = other DNA
atcttttttgatttctccccatccacggctgggagcttgcatccaaagat

SEQ ID NO: 56107 - DNA, 50 bp, synthetic construct
  source 1..50: mol_type = other DNA
actacaaactcaaacaccacggcggcgcccttggtgtgatagtgtgtgtt

SEQ ID NO: 56108 - DNA, 50 bp, synthetic construct
  source 1..50: mol_type = other DNA
aaaccaggacagacgcttcgccttggaaagcaaagccgctttcccggttt

SEQ ID NO: 56109 - DNA, 50 bp, synthetic construct
  source 1..50: mol_type = other DNA
tgcgtgatattttgcagcgcaataatgattgcgttgcaaaaaattactct

SEQ ID NO: 56110 - DNA, 50 bp, synthetic construct
  source 1..50: mol_type = other DNA
ctgaacgctgtttttgttctttgtcagctcccaacaaaaacagcttgcag

SEQ ID NO: 56111 - DNA, 50 bp, synthetic construct
  source 1..50: mol_type = other DNA
atctccgtcatgctgccgccgatggccatttgatccgcgctgttttcatc

SEQ ID NO: 56112 - DNA, 50 bp, synthetic construct
  source 1..50: mol_type = other DNA
tgagtaaattttgtacccaaacagtactattttgttgagtctgtaactcc

SEQ ID NO: 56113 - DNA, 50 bp, synthetic construct
  source 1..50: mol_type = other DNA
ttctgacattagacagatattaaaatttgtctattgacgaaatacaagaa

SEQ ID NO: 56114 - DNA, 50 bp, synthetic construct
  source 1..50: mol_type = other DNA
tggaaaaagaaagggaaaaggaggggacttatttacttgctaattgtatc

SEQ ID NO: 56115 - DNA, 50 bp, synthetic construct
  source 1..50: mol_type = other DNA
ttcgaccgggtgaaccaggctcttttcaaaaaaaggtagaacgaatcgaa

SEQ ID NO: 56116 - DNA, 50 bp, synthetic construct
  source 1..50: mol_type = other DNA
tagaatggcgtatagggggaatgagctcattaccgcgatacgctgaaacc

SEQ ID NO: 56117 - DNA, 50 bp, synthetic construct
  source 1..50: mol_type = other DNA
ctatttctaaagaattagaagatttaaaattgtaaaaattatggaggtag

SEQ ID NO: 56118 - DNA, 50 bp, synthetic construct
  source 1..50: mol_type = other DNA
tcatcaaatagaatctcatttgatttctgcactgattttccctgcatcag

SEQ ID NO: 56119 - DNA, 50 bp, synthetic construct
  source 1..50: mol_type = other DNA
ttattgatgtcagttccggggagaatttcatttccgttaaactccaaaaa

SEQ ID NO: 56120 - DNA, 50 bp, synthetic construct
  source 1..50: mol_type = other DNA
attatcaggatataaatcggcaagatcgatcacattggtagcaccacaat

SEQ ID NO: 56121 - DNA, 50 bp, synthetic construct
  source 1..50: mol_type = other DNA
aatggaaggttttttaacattgtctgtcaatgattaaagatgtatccatt

SEQ ID NO: 56122 - DNA, 50 bp, synthetic construct
  source 1..50: mol_type = other DNA
ggtagtctatatatcactctaacccctcaaatccaaatttatgtccttcc

SEQ ID NO: 56123 - DNA, 50 bp, synthetic construct
  source 1..50: mol_type = other DNA
gcataatcgaatctcctttgtagtatgctgaaaaattacgggtatcatgt

SEQ ID NO: 56124 - DNA, 50 bp, synthetic construct
  source 1..50: mol_type = other DNA
gctttcctataccaaaacagcaaacttgtgaaaggtagatatatgaaaaa

SEQ ID NO: 56125 - DNA, 50 bp, synthetic construct
  source 1..50: mol_type = other DNA
atatttgattttattaaaaaataggtaacttttcaataataatcaacata

SEQ ID NO: 56126 - DNA, 50 bp, synthetic construct
  source 1..50: mol_type = other DNA
caacaatcacattgccgtcttgctggagcgttataccattgtgattgttc

SEQ ID NO: 56127 - DNA, 50 bp, synthetic construct
  source 1..50: mol_type = other DNA
caattcctgtgataaagagtacaattttgtactcttttttaatacaatag

SEQ ID NO: 56128 - DNA, 50 bp, synthetic construct
  source 1..50: mol_type = other DNA
aatagcttgtactataggcaacacttgtgtataatatcgttcccccttgt

SEQ ID NO: 56129 - DNA, 50 bp, synthetic construct
  source 1..50: mol_type = other DNA
aagtaattgcgaattttttaggagttctgctaaaaattctttaattgaat

SEQ ID NO: 56130 - DNA, 50 bp, synthetic construct
  source 1..50: mol_type = other DNA
caaagtattaaagacgctgtatcttcctctacaccgtctaaaataccggc

SEQ ID NO: 56131 - DNA, 50 bp, synthetic construct
  source 1..50: mol_type = other DNA
ttactgggctttcttaaaaaatccttgtatcatcttcggaacagcttcgc

SEQ ID NO: 56132 - DNA, 50 bp, synthetic construct
  source 1..50: mol_type = other DNA
gctgcacctcaatttcgaggctctgaaaaatagggaaaaagcattgcagg

SEQ ID NO: 56133 - DNA, 50 bp, synthetic construct
  source 1..50: mol_type = other DNA
gcagtttttcaacggcatcatcttttaagatttatttagataaaaactgc

SEQ ID NO: 56134 - DNA, 50 bp, synthetic construct
  source 1..50: mol_type = other DNA
tttcaatagtataatatcactatatttcaggtgatattatggcatattgt

SEQ ID NO: 56135 - DNA, 50 bp, synthetic construct
  source 1..50: mol_type = other DNA
tgctatttcctttcttttcctgtctggagtggaacagaaagcacatttta

SEQ ID NO: 56136 - DNA, 50 bp, synthetic construct
  source 1..50: mol_type = other DNA
tatgggatgtcaaggattcaaatataggaaattcatcttgagaaacgata

SEQ ID NO: 56137 - DNA, 50 bp, synthetic construct
  source 1..50: mol_type = other DNA
ctgtttaatagaacttcattttctataaaaaatgtgtttaaattaaaaat

SEQ ID NO: 56138 - DNA, 50 bp, synthetic construct
  source 1..50: mol_type = other DNA
tgtacaaactaaatgttgcggttttgaaaccgcggagcagaatgggtatt

SEQ ID NO: 56139 - DNA, 50 bp, synthetic construct
  source 1..50: mol_type = other DNA
ttttgttaatttatttgacagaaatatggaggttttaattatgtacaaaa

SEQ ID NO: 56140 - DNA, 50 bp, synthetic construct
  source 1..50: mol_type = other DNA
ttgcagattatattaagaagcttccagattgtacttgctattattggctt

SEQ ID NO: 56141 - DNA, 50 bp, synthetic construct
  source 1..50: mol_type = other DNA
tcatgaagtccaaacagctccatctgctcccagctacccagattacaaaa

SEQ ID NO: 56142 - DNA, 50 bp, synthetic construct
  source 1..50: mol_type = other DNA
tttggttttgaaacctttaccggaaaaccgtaaaaccgatgaaaagtgaa

SEQ ID NO: 56143 - DNA, 50 bp, synthetic construct
  source 1..50: mol_type = other DNA
gtactccacatcctcatccaacatccaatatggatttttatctactccat

SEQ ID NO: 56144 - DNA, 50 bp, synthetic construct
  source 1..50: mol_type = other DNA
cctcatttcggttgcccatcgtcatatgaatatctgcatatataatagtc

SEQ ID NO: 56145 - DNA, 50 bp, synthetic construct
  source 1..50: mol_type = other DNA
gcagtttttgaaatccacgaatataggtatggaaaataacaaaaaactga

SEQ ID NO: 56146 - DNA, 50 bp, synthetic construct
  source 1..50: mol_type = other DNA
tgtgaaaatgtatgtaaaaaagggtataaaattttgtcaacacaggattt

SEQ ID NO: 56147 - DNA, 50 bp, synthetic construct
  source 1..50: mol_type = other DNA
attgtccttgatatggtctttgaccaaggaaagaaaggtgaaaggtatcc

SEQ ID NO: 56148 - DNA, 50 bp, synthetic construct
  source 1..50: mol_type = other DNA
atatcatcattattttcttcttctgaccatgaagaaaattgagatttttg

SEQ ID NO: 56149 - DNA, 50 bp, synthetic construct
  source 1..50: mol_type = other DNA
gcgtatcagcggcgccgccggtcggccgcgcggcagcggcgctgacagaa

SEQ ID NO: 56150 - DNA, 50 bp, synthetic construct
  source 1..50: mol_type = other DNA
aacatatcaagctttatttgatacaacatcttgtgaaatgatgatatacc

SEQ ID NO: 56151 - DNA, 50 bp, synthetic construct
  source 1..50: mol_type = other DNA
cggctacagcattgaaaacggctgcgatgcagtattcataagttctgccg

SEQ ID NO: 56152 - DNA, 50 bp, synthetic construct
  source 1..50: mol_type = other DNA
gctcggtgagaatttcattgtaaaagttcctaaaaaaatcgtcactgtca

SEQ ID NO: 56153 - DNA, 50 bp, synthetic construct
  source 1..50: mol_type = other DNA
tataggcccaatgcagaaattatatatatattttgtcgatgacaggactc

SEQ ID NO: 56154 - DNA, 50 bp, synthetic construct
  source 1..50: mol_type = other DNA
aatggcaagagggaaaaattactatcgtgtaattttcaaatatcgctatt

SEQ ID NO: 56155 - DNA, 50 bp, synthetic construct
  source 1..50: mol_type = other DNA
tcatagcactccacctcttgattaatttacagtgaggtggaagtctatgg

SEQ ID NO: 56156 - DNA, 50 bp, synthetic construct
  source 1..50: mol_type = other DNA
gatgggttctgcctcagaatatccagtgatatactatggcttattgtatt

SEQ ID NO: 56157 - DNA, 50 bp, synthetic construct
  source 1..50: mol_type = other DNA
gcctttctgcaactggttttcttcatgaaaaagtccagaagccatgcggg

SEQ ID NO: 56158 - DNA, 50 bp, synthetic construct
  source 1..50: mol_type = other DNA
gccatgctcaaaaataatttttatactaacaaaggaggattcagcatggc

SEQ ID NO: 56159 - DNA, 50 bp, synthetic construct
  source 1..50: mol_type = other DNA
gtccgggcctccatatatcaattaaccgatcacaataaagagctttggaa

SEQ ID NO: 56160 - DNA, 50 bp, synthetic construct
  source 1..50: mol_type = other DNA
aaacaaacaatcacctccacgtgcttgcacttggcgtcgattgggtgttg

SEQ ID NO: 56161 - DNA, 50 bp, synthetic construct
  source 1..50: mol_type = other DNA
atcatcgtgggcggtcttccgcgatatattgtatatttacagacgaagag

SEQ ID NO: 56162 - DNA, 50 bp, synthetic construct
  source 1..50: mol_type = other DNA
ttttatggaaattatagggagttttaaaattcttgattcgagcataaaaa

SEQ ID NO: 56163 - DNA, 50 bp, synthetic construct
  source 1..50: mol_type = other DNA
cataacattctgtatttctttattttgaaaatactctttatctttgcatc

SEQ ID NO: 56164 - DNA, 50 bp, synthetic construct
  source 1..50: mol_type = other DNA
cgtcgcatacctacataatttttaaataaaaattaaacaaaaattatatc

SEQ ID NO: 56165 - DNA, 50 bp, synthetic construct
  source 1..50: mol_type = other DNA
aaaaggctcaatgacggcagagaaattttcatagtcacacttgggttttt

SEQ ID NO: 56166 - DNA, 50 bp, synthetic construct
  source 1..50: mol_type = other DNA
tgtcaaaacgaataggtcataagtcagttgttcatcgcttcggcttgaaa

SEQ ID NO: 56167 - DNA, 50 bp, synthetic construct
  source 1..50: mol_type = other DNA
atcgaagcataaaacaaggctccccggacagcctgaacgagtcttttgac

SEQ ID NO: 56168 - DNA, 50 bp, synthetic construct
  source 1..50: mol_type = other DNA
ggagagatgggaaatctttcacctataggcctgatgctttgcataggtct

SEQ ID NO: 56169 - DNA, 50 bp, synthetic construct
  source 1..50: mol_type = other DNA
gatgtgtaagttatggtaatattagttgatattaccgtttccgctacggc

SEQ ID NO: 56170 - DNA, 50 bp, synthetic construct
  source 1..50: mol_type = other DNA
atacacctcttgtcaggacgctccaggtacaaatccttcaaacggtctag

SEQ ID NO: 56171 - DNA, 50 bp, synthetic construct
  source 1..50: mol_type = other DNA
gatgtaaggagtaaataaccgtcgtaggcactctatgcactacttgaaat

SEQ ID NO: 56172 - DNA, 50 bp, synthetic construct
  source 1..50: mol_type = other DNA
gacaaatgcagaatgagccgcaagcgcttgaatggggttcaagaggccgt

SEQ ID NO: 56173 - DNA, 50 bp, synthetic construct
  source 1..50: mol_type = other DNA
tattgttttatttacagccgcttcaaatgggaattgttaataaaacaaaa

SEQ ID NO: 56174 - DNA, 50 bp, synthetic construct
  source 1..50: mol_type = other DNA
tgtcgataatcagattgacccgccggggcaggagaataagtgatttttct

SEQ ID NO: 56175 - DNA, 50 bp, synthetic construct
  source 1..50: mol_type = other DNA
aacgtaaaaagagcagcggaattatcgtatttatctgctctcgttagaaa

SEQ ID NO: 56176 - DNA, 50 bp, synthetic construct
  source 1..50: mol_type = other DNA
gtttaagttttatttaaaaagacaattgttttttctggcatgtttgccgc

SEQ ID NO: 56177 - DNA, 50 bp, synthetic construct
  source 1..50: mol_type = other DNA
gaaaatgatttctcgtcgcgacttcctatcgagaaaaggttcggattttc

SEQ ID NO: 56178 - DNA, 50 bp, synthetic construct
  source 1..50: mol_type = other DNA
agagccgtcctgataagatctcttatgataagctgtatcatgttccttct

SEQ ID NO: 56179 - DNA, 50 bp, synthetic construct
  source 1..50: mol_type = other DNA
aaattctgccactcctttctctttggaaaatgaacagcgtgttgccgtat

SEQ ID NO: 56180 - DNA, 50 bp, synthetic construct
  source 1..50: mol_type = other DNA
gatgtacaacattgctctttattttcaaatacagaataatgttgtataaa

SEQ ID NO: 56181 - DNA, 50 bp, synthetic construct
  source 1..50: mol_type = other DNA
catggaaggttcctgctcctgccaccgatcaggaatcgcaactcccaatc

SEQ ID NO: 56182 - DNA, 50 bp, synthetic construct
  source 1..50: mol_type = other DNA
ttgttgcgaagccattcgcagcgaaattaaagctcgtgcaatcgctacac

SEQ ID NO: 56183 - DNA, 50 bp, synthetic construct
  source 1..50: mol_type = other DNA
catttccaacatctatgtactgatgaattagcgcatagatgttggaaatg

SEQ ID NO: 56184 - DNA, 50 bp, synthetic construct
  source 1..50: mol_type = other DNA
tctgacgggcggcacacctcccgtcagcggcaagaacacagaccgtccga

SEQ ID NO: 56185 - DNA, 50 bp, synthetic construct
  source 1..50: mol_type = other DNA
tgatcattccaacccgcaaacaactgaaagtttgatggttggtttgatct

SEQ ID NO: 56186 - DNA, 50 bp, synthetic construct
  source 1..50: mol_type = other DNA
gcgagatcgaggagcttcccgaagcctatgcggaaaagaatggcttcaca

SEQ ID NO: 56187 - DNA, 50 bp, synthetic construct
  source 1..50: mol_type = other DNA
tccagatgatgaatgtatatctttgctgttttattatgcttagagctgct

SEQ ID NO: 56188 - DNA, 50 bp, synthetic construct
  source 1..50: mol_type = other DNA
ctggatcgggccgtgcgccataccgatgttctccgctgggccacgtccaa

SEQ ID NO: 56189 - DNA, 50 bp, synthetic construct
  source 1..50: mol_type = other DNA
gttgagagacatattttttcaacaattgatgaaagggcaaactgtaactg

SEQ ID NO: 56190 - DNA, 50 bp, synthetic construct
  source 1..50: mol_type = other DNA
acgaattccactacttgaagaaaagatttgaagggaaaaccgtaattcag

SEQ ID NO: 56191 - DNA, 50 bp, synthetic construct
  source 1..50: mol_type = other DNA
ttgttttcagaaccggcagttttcgcaaaacttctttgcggtggatacaa

SEQ ID NO: 56192 - DNA, 50 bp, synthetic construct
  source 1..50: mol_type = other DNA
ggcataacccacaactcgtttcgattgcgttcttgcctgtggtgtaggca

SEQ ID NO: 56193 - DNA, 50 bp, synthetic construct
  source 1..50: mol_type = other DNA
cctttgtcgcgcctgcgggctgtgtattttggttgtaaaggagacaattc

SEQ ID NO: 56194 - DNA, 50 bp, synthetic construct
  source 1..50: mol_type = other DNA
ccctgttcttccagacggaaggatggtgccttccgggcgcaggagccgga

SEQ ID NO: 56195 - DNA, 50 bp, synthetic construct
  source 1..50: mol_type = other DNA
ctatgacaagtggcgggatcgtggacttcgactcccgcaggcccacggca

SEQ ID NO: 56196 - DNA, 50 bp, synthetic construct
  source 1..50: mol_type = other DNA
tatcgtggttacggatttggccatttatcgccaaagggcgaacagctata

SEQ ID NO: 56197 - DNA, 50 bp, synthetic construct
  source 1..50: mol_type = other DNA
tgtacccaaatatggtcggtatctttctccgccgattttgccgcttgagg

SEQ ID NO: 56198 - DNA, 50 bp, synthetic construct
  source 1..50: mol_type = other DNA
acaccctgagcatttcagtagcttcagcatgaagccggtgctcctggtga

SEQ ID NO: 56199 - DNA, 50 bp, synthetic construct
  source 1..50: mol_type = other DNA
tcaaaacacatcttcctcctgaaaaaattcaagaggggcggaagtgcttt

SEQ ID NO: 56200 - DNA, 50 bp, synthetic construct
  source 1..50: mol_type = other DNA
agttcgcccggccgagcctcgaggcgcttcgacgccgagctgacggtggc

SEQ ID NO: 56201 - DNA, 50 bp, synthetic construct
  source 1..50: mol_type = other DNA
aatatgatgtcgtttcttccagcgcattttgatagaaagaaggttttatt

SEQ ID NO: 56202 - DNA, 50 bp, synthetic construct
  source 1..50: mol_type = other DNA
gatggtggcaatggtcacatcgaagcttctggagtaccataacgacgaaa

SEQ ID NO: 56203 - DNA, 50 bp, synthetic construct
  source 1..50: mol_type = other DNA
aactaaattcgacttcctcaataaattactatgaaagcagcaatttatgt

SEQ ID NO: 56204 - DNA, 50 bp, synthetic construct
  source 1..50: mol_type = other DNA
tacctttcacctttctttccttggcagcacagaaataaaggtggtaagtc

SEQ ID NO: 56205 - DNA, 50 bp, synthetic construct
  source 1..50: mol_type = other DNA
aatatgcttacaaaagaaagatattaaaatcttatatttataaggataac

SEQ ID NO: 56206 - DNA, 50 bp, synthetic construct
  source 1..50: mol_type = other DNA
cctgttcttccagacggaaggatgggtactgctccttggtgaagagcagg

SEQ ID NO: 56207 - DNA, 50 bp, synthetic construct
  source 1..50: mol_type = other DNA
agatgccgctgcgaaaagcctagaagtcgcggcttttcggcgcggcgatc

SEQ ID NO: 56208 - DNA, 50 bp, synthetic construct
  source 1..50: mol_type = other DNA
tttcctcattccaactgtcttttcggttgaatacaaccagattgatcaat

SEQ ID NO: 56209 - DNA, 50 bp, synthetic construct
  source 1..50: mol_type = other DNA
acgcagaaaaccggtgtgaaaagaagatctttgcaaactgtttcctgcgg

SEQ ID NO: 56210 - DNA, 50 bp, synthetic construct
  source 1..50: mol_type = other DNA
cgtatatattcttcgtatttctccgtggaggaacagtaatgccggaagca

SEQ ID NO: 56211 - DNA, 50 bp, synthetic construct
  source 1..50: mol_type = other DNA
ggcccgctggtaccgctgcgacatcgtgctcgctgcggacggcatcgtgc

SEQ ID NO: 56212 - DNA, 50 bp, synthetic construct
  source 1..50: mol_type = other DNA
attatttttttgtgattgttatactagtataaaaatctctgttatttttt

SEQ ID NO: 56213 - DNA, 50 bp, synthetic construct
  source 1..50: mol_type = other DNA
aaagcaaatttacaaactataccttcgtgcaacacattgcaatttatatt

SEQ ID NO: 56214 - DNA, 50 bp, synthetic construct
  source 1..50: mol_type = other DNA
cttcatcacagccatgatcgaagatatttatattcagagaaaggatgata

SEQ ID NO: 56215 - DNA, 50 bp, synthetic construct
  source 1..50: mol_type = other DNA
tccgaatggcgcgcggctctgtcgcgtaaagttcccgcgcgtcattttgt

SEQ ID NO: 56216 - DNA, 50 bp, synthetic construct
  source 1..50: mol_type = other DNA
tattccctttgaggtcaagcgcacaacaaccattcgtctcatcggcaaat

SEQ ID NO: 56217 - DNA, 50 bp, synthetic construct
  source 1..50: mol_type = other DNA
ccttggttgcagacgggacttgatttgcaaacccatgtctgcaatcgcct

SEQ ID NO: 56218 - DNA, 50 bp, synthetic construct
  source 1..50: mol_type = other DNA
ggaaaaagaaatgagcagaacagtagcactttctcgaaatgatcgagaaa

SEQ ID NO: 56219 - DNA, 50 bp, synthetic construct
  source 1..50: mol_type = other DNA
ttattgacaattctctaaatatgctgagcgatttataccatttaagttaa

SEQ ID NO: 56220 - DNA, 50 bp, synthetic construct
  source 1..50: mol_type = other DNA
attctgccactcctttctctttgggtagaaaatgaacagcgtgttgccgt

SEQ ID NO: 56221 - DNA, 50 bp, synthetic construct
  source 1..50: mol_type = other DNA
cacattccgtatggataccggattgaaatccatgggtgcgctggagatgg

SEQ ID NO: 56222 - DNA, 50 bp, synthetic construct
  source 1..50: mol_type = other DNA
cgacgctgcgggaaatgagggagccatatcgttcgctgttcgcgagaaga

SEQ ID NO: 56223 - DNA, 50 bp, synthetic construct
  source 1..50: mol_type = other DNA
ttacagaaaaataaaataacaaaaaagtttcttatggtatttttctattt

SEQ ID NO: 56224 - DNA, 50 bp, synthetic construct
  source 1..50: mol_type = other DNA
ttgtataatagtctctataattaaagttccctataggttctgttagggtt

SEQ ID NO: 56225 - DNA, 50 bp, synthetic construct
  source 1..50: mol_type = other DNA
acaggtccaatcagatctgattaaggcgaaaattatcggttttgactgga

SEQ ID NO: 56226 - DNA, 50 bp, synthetic construct
  source 1..50: mol_type = other DNA
tgctcgtcgtcattttcggtggcttgtatcaccgtcacaaaagaccagct

SEQ ID NO: 56227 - DNA, 50 bp, synthetic construct
  source 1..50: mol_type = other DNA
ttatttttgttataaaaggagcccataggtgaaaactattacaaaaatcg

SEQ ID NO: 56228 - DNA, 50 bp, synthetic construct
  source 1..50: mol_type = other DNA
attgattccttttctgaaacaccataaattttgatagatttcctttcaaa

SEQ ID NO: 56229 - DNA, 50 bp, synthetic construct
  source 1..50: mol_type = other DNA
gggattactacatccccgacctgaaacgccatcggcgatgcctgcaccgg

SEQ ID NO: 56230 - DNA, 50 bp, synthetic construct
  source 1..50: mol_type = other DNA
acaccaagagttagatttccgcgaatccgcgagctgcggtgccagcgtga

SEQ ID NO: 56231 - DNA, 50 bp, synthetic construct
  source 1..50: mol_type = other DNA
ccattcaagcgcgctaccaaaactgctgtttttgccgtttgccggagggg

SEQ ID NO: 56232 - DNA, 50 bp, synthetic construct
  source 1..50: mol_type = other DNA
ttgctttatctgcggcatatatttatacggatcttggaaagagcaagacg

SEQ ID NO: 56233 - DNA, 50 bp, synthetic construct
  source 1..50: mol_type = other DNA
agagccgtgcataatatgttataataagagctgtgggtatggtcgtggat

SEQ ID NO: 56234 - DNA, 50 bp, synthetic construct
  source 1..50: mol_type = other DNA
cgactgtaaattccttgacgcatctgcctgcgccataacttttctcattc

SEQ ID NO: 56235 - DNA, 50 bp, synthetic construct
  source 1..50: mol_type = other DNA
atcgctctactaaaaatcaatgccattttattaatcttatgtattatagt

SEQ ID NO: 56236 - DNA, 50 bp, synthetic construct
  source 1..50: mol_type = other DNA
tcgcgtgaaatcgacgacgatcaaatttgatgttctgcaagaatacctga

SEQ ID NO: 56237 - DNA, 50 bp, synthetic construct
  source 1..50: mol_type = other DNA
caccttacgtcgctatcacgcggatttccgccgcgtagagagcttctgga

SEQ ID NO: 56238 - DNA, 50 bp, synthetic construct
  source 1..50: mol_type = other DNA
acttatgttctgcggttctcaataccctttgtcgtgtgcgatggataagt

SEQ ID NO: 56239 - DNA, 50 bp, synthetic construct
  source 1..50: mol_type = other DNA
agagaaaagtaacggcgatcccggcgcctttataatagtcggctttcttg

SEQ ID NO: 56240 - DNA, 50 bp, synthetic construct
  source 1..50: mol_type = other DNA
ctggggttttcttatacgttgtactagtacaacactacccaaaaacaaca

SEQ ID NO: 56241 - DNA, 50 bp, synthetic construct
  source 1..50: mol_type = other DNA
tcagactgtttcttgcagagttatcatttactcgaaaatcaagctgctgt

SEQ ID NO: 56242 - DNA, 50 bp, synthetic construct
  source 1..50: mol_type = other DNA
accatacatcactctaaaaggctgtaaaggccgggccggtgttccttcag

SEQ ID NO: 56243 - DNA, 50 bp, synthetic construct
  source 1..50: mol_type = other DNA
atatcaattttcctttctttggtacgcactataaataataaatatgataa

SEQ ID NO: 56244 - DNA, 50 bp, synthetic construct
  source 1..50: mol_type = other DNA
atcaggaaaaccgtgtccgccaggtgtcttgccatatcaattttcctttc

SEQ ID NO: 56245 - DNA, 50 bp, synthetic construct
  source 1..50: mol_type = other DNA
cacttaaattcctccttacaaattcaacaaaacttctttttgattatttg

SEQ ID NO: 56246 - DNA, 50 bp, synthetic construct
  source 1..50: mol_type = other DNA
ggcaacgaagcgaagagtgtctgccggcgtatccgagcagctggatatgc

SEQ ID NO: 56247 - DNA, 50 bp, synthetic construct
  source 1..50: mol_type = other DNA
atggcagagcgaaagtgtggattttagaatccactggtttgatgacacct

SEQ ID NO: 56248 - DNA, 50 bp, synthetic construct
  source 1..50: mol_type = other DNA
aaactgaatcagcctgtttccatcatggaggaattatgaagaaaaacttt

SEQ ID NO: 56249 - DNA, 50 bp, synthetic construct
  source 1..50: mol_type = other DNA
cggaagccacagccatacggtagcacgctatgctaattttgtaacttaaa

SEQ ID NO: 56250 - DNA, 50 bp, synthetic construct
  source 1..50: mol_type = other DNA
cagcagtaacagcggcgcgggtaacggtatatcggccatgaggacgacac

SEQ ID NO: 56251 - DNA, 50 bp, synthetic construct
  source 1..50: mol_type = other DNA
aatggagaaggaagcaaggaaagcaagcctttcttaaagcccgctcgcac

SEQ ID NO: 56252 - DNA, 50 bp, synthetic construct
  source 1..50: mol_type = other DNA
gtggcagcctactgccgtgtgtcaaccgacacagatcattgacctggcat

SEQ ID NO: 56253 - DNA, 50 bp, synthetic construct
  source 1..50: mol_type = other DNA
cacaaaaaataaattatacgaagaaaacaatgataaaaatacttttcatc

SEQ ID NO: 56254 - DNA, 50 bp, synthetic construct
  source 1..50: mol_type = other DNA
tcagttgtaatcctataattcatttatactgtgtatagtattccacctga

SEQ ID NO: 56255 - DNA, 50 bp, synthetic construct
  source 1..50: mol_type = other DNA
tttcaggaatttggtcacaaccagatctgtgcttgacaagcctcttgaaa

SEQ ID NO: 56256 - DNA, 50 bp, synthetic construct
  source 1..50: mol_type = other DNA
taccatgtttgtcaagccgtcactgcttagacggattcttcgacaaggta

SEQ ID NO: 56257 - DNA, 50 bp, synthetic construct
  source 1..50: mol_type = other DNA
ataggatgtagaaaggcgggattatatgggatataccgcgtctttttcat

SEQ ID NO: 56258 - DNA, 50 bp, synthetic construct
  source 1..50: mol_type = other DNA
cgaaaatctcttcggcaacgcttgcgcacctgtattatagcagattttct

SEQ ID NO: 56259 - DNA, 50 bp, synthetic construct
  source 1..50: mol_type = other DNA
gcagaacagcagcacggtcggtcacatcgccgcctatgctgactacgagc

SEQ ID NO: 56260 - DNA, 50 bp, synthetic construct
  source 1..50: mol_type = other DNA
tggatatttcccgctctaccgtgcaggcaaggaggaaaaagaaatgagca

SEQ ID NO: 56261 - DNA, 50 bp, synthetic construct
  source 1..50: mol_type = other DNA
atcctttttcttgaaccttccatctggagatggctgatgagaaaaacaaa

SEQ ID NO: 56262 - DNA, 50 bp, synthetic construct
  source 1..50: mol_type = other DNA
tgcccgaatagccagggttattagcgctgccgcctttaccagttttggca

SEQ ID NO: 56263 - DNA, 50 bp, synthetic construct
  source 1..50: mol_type = other DNA
ttcggtctggcgcggcatctggcgttcgcggcaggccgtatcggactggg

SEQ ID NO: 56264 - DNA, 50 bp, synthetic construct
  source 1..50: mol_type = other DNA
acgtgcaaaccaaggagttccttcgtgatgggcgtggctgtaaagcgagt

SEQ ID NO: 56265 - DNA, 50 bp, synthetic construct
  source 1..50: mol_type = other DNA
attaatgcctatatttttaggcgtatattgataaaaaaacggtgtgtata

SEQ ID NO: 56266 - DNA, 50 bp, synthetic construct
  source 1..50: mol_type = other DNA
gaaagatttgtacatgaatgatctgatgatcatatgagaaaccaaaacac

SEQ ID NO: 56267 - DNA, 50 bp, synthetic construct
  source 1..50: mol_type = other DNA
ggccgctgcctcccgctgctcctccagaggagcaggacgacaccgaggcc

SEQ ID NO: 56268 - DNA, 50 bp, synthetic construct
  source 1..50: mol_type = other DNA
tgaatccagatagtcctgttccacttctggatcagacctatccgggagtc

SEQ ID NO: 56269 - DNA, 50 bp, synthetic construct
  source 1..50: mol_type = other DNA
gtggcgggcattttagtgtatgcacttgcgacatctgaggaacccgttgt

SEQ ID NO: 56270 - DNA, 50 bp, synthetic construct
  source 1..50: mol_type = other DNA
tgccgaggtatacaagtactaccgcgcttgcgactaacgagatattggcc

SEQ ID NO: 56271 - DNA, 50 bp, synthetic construct
  source 1..50: mol_type = other DNA
tcacttttttatcatgcgtctttctgtattcatttgttatacaaaaatta

SEQ ID NO: 56272 - DNA, 50 bp, synthetic construct
  source 1..50: mol_type = other DNA
tgacaggtacatcataccgcagcagctgctggaaaacgccaagccccagc

SEQ ID NO: 56273 - DNA, 50 bp, synthetic construct
  source 1..50: mol_type = other DNA
ttaattgcagctgtgtattttgctgtgataaaaaatgatgcagcaggcat

SEQ ID NO: 56274 - DNA, 50 bp, synthetic construct
  source 1..50: mol_type = other DNA
gaccattcagccgttatccgacattctttacaacgggcggctgatctgtc

SEQ ID NO: 56275 - DNA, 50 bp, synthetic construct
  source 1..50: mol_type = other DNA
ctctggtgaaaatggatttgtcagaaaaccagaatccagcaccagaaaag

SEQ ID NO: 56276 - DNA, 50 bp, synthetic construct
  source 1..50: mol_type = other DNA
ccccactcctgcggaactccttaaattcccgcacagccgcagcttctttc

SEQ ID NO: 56277 - DNA, 50 bp, synthetic construct
  source 1..50: mol_type = other DNA
ctttgtatcaaataacgagtcttaattatcgtttttagagtgatatatag

SEQ ID NO: 56278 - DNA, 50 bp, synthetic construct
  source 1..50: mol_type = other DNA
gcggcgaggcgcttttttctgttaattttctgaactgacaataccgtagg

SEQ ID NO: 56279 - DNA, 50 bp, synthetic construct
  source 1..50: mol_type = other DNA
tccagtttcagaccttcaagggctgttgtctatgtaggtctgtgagccga

SEQ ID NO: 56280 - DNA, 50 bp, synthetic construct
  source 1..50: mol_type = other DNA
taatcaggctcatgtccaccatttcacaaaaccggacaaagaaaatttta

SEQ ID NO: 56281 - DNA, 50 bp, synthetic construct
  source 1..50: mol_type = other DNA
tcctttctctttgggtagtctatataatttaccttgcgtaagaaaaagga

SEQ ID NO: 56282 - DNA, 50 bp, synthetic construct
  source 1..50: mol_type = other DNA
acatcagagccgataaactggaagagcttgtggccggttgtaatctatta

SEQ ID NO: 56283 - DNA, 50 bp, synthetic construct
  source 1..50: mol_type = other DNA
tgttgtactatcttatacgctcctgtaggtgcgttatagttagtacaaca

SEQ ID NO: 56284 - DNA, 50 bp, synthetic construct
  source 1..50: mol_type = other DNA
gttatcctttcgggtcacactcatatatcccggcttgtccttgggattta

SEQ ID NO: 56285 - DNA, 50 bp, synthetic construct
  source 1..50: mol_type = other DNA
tggcggcctactgccgtgtgtcaacggaagtgaaccgaagtactccgtct

SEQ ID NO: 56286 - DNA, 50 bp, synthetic construct
  source 1..50: mol_type = other DNA
tcggaaattacaagaagctgcttagctactcatatatttgaaatattttc

SEQ ID NO: 56287 - DNA, 50 bp, synthetic construct
  source 1..50: mol_type = other DNA
ctttgtcttttatgttgtcgctgcctgctgcaataagttcgcagacaaga

SEQ ID NO: 56288 - DNA, 50 bp, synthetic construct
  source 1..50: mol_type = other DNA
atccgcaagcagcaggggccgcgcggccccggcccggagcgaaagctgat

SEQ ID NO: 56289 - DNA, 50 bp, synthetic construct
  source 1..50: mol_type = other DNA
aagtgggcagaaaacgccgggtggcggcagcaacgccatgctggccaata

SEQ ID NO: 56290 - DNA, 50 bp, synthetic construct
  source 1..50: mol_type = other DNA
tgcatgttttcttttttgccgctggacgccggaaatgagggaaaaagcaa

SEQ ID NO: 56291 - DNA, 50 bp, synthetic construct
  source 1..50: mol_type = other DNA
ggcacacataccagtagggtacaaaagacacaccgactggaagactggag

SEQ ID NO: 56292 - DNA, 50 bp, synthetic construct
  source 1..50: mol_type = other DNA
gcgtgttgagttcagcgcagagtttaaacaaaaattatatctcaccacta

SEQ ID NO: 56293 - DNA, 50 bp, synthetic construct
  source 1..50: mol_type = other DNA
gcgaacacgaaacatatacaagcagggaaatgtatagagttacgcttttc

SEQ ID NO: 56294 - DNA, 50 bp, synthetic construct
  source 1..50: mol_type = other DNA
ttgcctttcttcgtaggtcgtttcaagagcaggactgagaagaaacttaa

SEQ ID NO: 56295 - DNA, 50 bp, synthetic construct
  source 1..50: mol_type = other DNA
gccgccggccggtggctgcgtacgcacggccggcactacgacctggccac

SEQ ID NO: 56296 - DNA, 50 bp, synthetic construct
  source 1..50: mol_type = other DNA
tcttcgtctccaccaatgacacgaatacaagtcccgcttcggcaagaagg

SEQ ID NO: 56297 - DNA, 50 bp, synthetic construct
  source 1..50: mol_type = other DNA
gcaagggtccgatgagcaaggccaacagggaaagcgcaatccaccatctc

SEQ ID NO: 56298 - DNA, 50 bp, synthetic construct
  source 1..50: mol_type = other DNA
aatttgccgcatcagatgaaaaggtcgaatttggaaagaccgctcacgca

SEQ ID NO: 56299 - DNA, 50 bp, synthetic construct
  source 1..50: mol_type = other DNA
gaacattgttgccaccgacgcaaccgcttgctattcgcgcagctatgagc

SEQ ID NO: 56300 - DNA, 50 bp, synthetic construct
  source 1..50: mol_type = other DNA
cctcaagcggcaaaatcggtggagaaaaataccgaccgtatttgggtaca

SEQ ID NO: 56301 - DNA, 50 bp, synthetic construct
  source 1..50: mol_type = other DNA
taaaatttattcgtagagtttacagccgtccaggccatgaatcagcttcg

SEQ ID NO: 56302 - DNA, 50 bp, synthetic construct
  source 1..50: mol_type = other DNA
tgattattctccgacagacagattccgcagagtatcgtttttgataacca

SEQ ID NO: 56303 - DNA, 50 bp, synthetic construct
  source 1..50: mol_type = other DNA
taggtattctgcctgcctgaccggatagggtggcgcgtgaatttggggta

SEQ ID NO: 56304 - DNA, 50 bp, synthetic construct
  source 1..50: mol_type = other DNA
atttatgggataacagatttatagaaccgtagggtgtgtgtcccatcaaa

SEQ ID NO: 56305 - DNA, 50 bp, synthetic construct
  source 1..50: mol_type = other DNA
ttctgtatttcgagagagacgaagcccctcgcctccacttaaatacagac

SEQ ID NO: 56306 - DNA, 50 bp, synthetic construct
  source 1..50: mol_type = other DNA
ccattatgtttggctcctttcattggaaacactggagcgccgcatcatgg

SEQ ID NO: 56307 - DNA, 50 bp, synthetic construct
  source 1..50: mol_type = other DNA
ctgcattgccgcctgacactccttttgaatagaggcagtcggcaatgccg

SEQ ID NO: 56308 - DNA, 50 bp, synthetic construct
  source 1..50: mol_type = other DNA
atcacaatgaaaaataaagcattgattacaaaaacgcttgtctatgtcgc

SEQ ID NO: 56309 - DNA, 50 bp, synthetic construct
  source 1..50: mol_type = other DNA
agacgacctcggacgggtgcttgatgtcacacaccccaaggaggtgaacg

SEQ ID NO: 56310 - DNA, 50 bp, synthetic construct
  source 1..50: mol_type = other DNA
tgcggcggatttccttggggatcacgtgaaacgatggaaagaccgctcca

SEQ ID NO: 56311 - DNA, 50 bp, synthetic construct
  source 1..50: mol_type = other DNA
atataaagccgctatagcgtatgctaacaaactaaacagcggccttcttg

SEQ ID NO: 56312 - DNA, 50 bp, synthetic construct
  source 1..50: mol_type = other DNA
cgaaggaaaatacccggaacgaatcccttcgtttacggtatataccgatt

SEQ ID NO: 56313 - DNA, 50 bp, synthetic construct
  source 1..50: mol_type = other DNA
ttcttacaagaaattatttaagctgctgttctgctcataacttgtgcctc

SEQ ID NO: 56314 - DNA, 50 bp, synthetic construct
  source 1..50: mol_type = other DNA
aaaactgcgttgcaccttttatataaatataatagctgcatagcaaagga

SEQ ID NO: 56315 - DNA, 50 bp, synthetic construct
  source 1..50: mol_type = other DNA
gaagtcatgacccaccctgaagccccggctttaggattagtttccgcttc

SEQ ID NO: 56316 - DNA, 50 bp, synthetic construct
  source 1..50: mol_type = other DNA
atcaccccattatcgtttgcaaacgttttgttctggtattcggaattcac

SEQ ID NO: 56317 - DNA, 50 bp, synthetic construct
  source 1..50: mol_type = other DNA
gatgagctacgggcgcgctgttcgatgaaacacaggggacgctcttcttc

SEQ ID NO: 56318 - DNA, 50 bp, synthetic construct
  source 1..50: mol_type = other DNA
cgtctgcgccagccgcctgcgcgtcggcataacttcggctatgagagtcg

SEQ ID NO: 56319 - DNA, 50 bp, synthetic construct
  source 1..50: mol_type = other DNA
gtgggcgggtgattagacgcattttgaacaccggcacgctgcccgttcat

SEQ ID NO: 56320 - DNA, 50 bp, synthetic construct
  source 1..50: mol_type = other DNA
cgagtgaaatggatactaccgctacttagcctgcatagctatgcacctcg

SEQ ID NO: 56321 - DNA, 50 bp, synthetic construct
  source 1..50: mol_type = other DNA
gaagaagagcgtcccctgtgtttcatcgaacagcgcgcccgtagctcatc

SEQ ID NO: 56322 - DNA, 50 bp, synthetic construct
  source 1..50: mol_type = other DNA
cctgtacatcaccggcggctggatcagcccacccggcgaccctgaactgg

SEQ ID NO: 56323 - DNA, 50 bp, synthetic construct
  source 1..50: mol_type = other DNA
agaatgcccgcctgcgcggcaaaatattccgccatgatggattgcgttat

SEQ ID NO: 56324 - DNA, 50 bp, synthetic construct
  source 1..50: mol_type = other DNA
cgggattttgcctgcggaccggaggccgccgccaaacaggatgccaccga

SEQ ID NO: 56325 - DNA, 50 bp, synthetic construct
  source 1..50: mol_type = other DNA
gggatcacggcgtttcaaaaagcgttatcgttctgtaatctggtgatccc

SEQ ID NO: 56326 - DNA, 50 bp, synthetic construct
  source 1..50: mol_type = other DNA
tgctcccctcgatcccatgaccaaagatggctatgggcgtgtcgggtgcg

SEQ ID NO: 56327 - DNA, 50 bp, synthetic construct
  source 1..50: mol_type = other DNA
aaaagttccgataatatatttaaatataaaattgtatatgaggtgattac

SEQ ID NO: 56328 - DNA, 50 bp, synthetic construct
  source 1..50: mol_type = other DNA
tatataaagcacaaaaatggatagataataacatttttgacattccgtgt

SEQ ID NO: 56329 - DNA, 50 bp, synthetic construct
  source 1..50: mol_type = other DNA
tcaaattattctccttttgtattacttaataatctccgctctcttcttga

SEQ ID NO: 56330 - DNA, 50 bp, synthetic construct
  source 1..50: mol_type = other DNA
tcaccacagacacaaaaaacacccccaaatgttttctttctcaaaaaaca

SEQ ID NO: 56331 - DNA, 50 bp, synthetic construct
  source 1..50: mol_type = other DNA
gaagaatatctggatggacgagcttggcgttgttgatcggaatgcttctc

SEQ ID NO: 56332 - DNA, 50 bp, synthetic construct
  source 1..50: mol_type = other DNA
atacatttcatcattttcacctctgtatatgtgaaaatatctatttatat

SEQ ID NO: 56333 - DNA, 50 bp, synthetic construct
  source 1..50: mol_type = other DNA
ttcatcttaataaatatgaaggagaattcgttgatatataagggcttcag

SEQ ID NO: 56334 - DNA, 50 bp, synthetic construct
  source 1..50: mol_type = other DNA
tggttttcttcttattgactagaattttttaatgagtaaggatatggaac

SEQ ID NO: 56335 - DNA, 50 bp, synthetic construct
  source 1..50: mol_type = other DNA
atttccctttttcatttatccacctatatgttcgaaaggagaagggaaat

SEQ ID NO: 56336 - DNA, 50 bp, synthetic construct
  source 1..50: mol_type = other DNA
agggttgcaattaatgacaaagaaattgacttgactataccttcaaaaag

SEQ ID NO: 56337 - DNA, 50 bp, synthetic construct
  source 1..50: mol_type = other DNA
gtttgattttatttttatgaaaaaaacactgaatttaaatttattaaatg

SEQ ID NO: 56338 - DNA, 50 bp, synthetic construct
  source 1..50: mol_type = other DNA
cgaaacttggtcttgttatttcttttaagaaacaccaaccgccgatcgga

SEQ ID NO: 56339 - DNA, 50 bp, synthetic construct
  source 1..50: mol_type = other DNA
taagcaacgcataagaatttgaagtacgcaaacaaggtaattctcgcgta

SEQ ID NO: 56340 - DNA, 50 bp, synthetic construct
  source 1..50: mol_type = other DNA
tccgaccgtgctgtttgcctgcgtcgagaagcaccaaccgccgatcggga

SEQ ID NO: 56341 - DNA, 50 bp, synthetic construct
  source 1..50: mol_type = other DNA
cacaggcattttgtgtttacaattgatattgacaacccaaacggcctagg

SEQ ID NO: 56342 - DNA, 50 bp, synthetic construct
  source 1..50: mol_type = other DNA
agtcattaatttgacattccctctgccaagtcccggtaatttttttgacg

SEQ ID NO: 56343 - DNA, 50 bp, synthetic construct
  source 1..50: mol_type = other DNA
atatttatatatcatttaataaatttttatatcaaatgatcaatgaaaaa

SEQ ID NO: 56344 - DNA, 50 bp, synthetic construct
  source 1..50: mol_type = other DNA
cgtagtcgacgatctcatacccgtgccgctactcctcctcgtcctcttcg

SEQ ID NO: 56345 - DNA, 50 bp, synthetic construct
  source 1..50: mol_type = other DNA
ctggcgcagagcttccagggcgttttgacggccttgatcctctgcgacgc

SEQ ID NO: 56346 - DNA, 50 bp, synthetic construct
  source 1..50: mol_type = other DNA
ttcattatttgcctataaagtaagaggaaaattcataggcaaacttttgc

SEQ ID NO: 56347 - DNA, 50 bp, synthetic construct
  source 1..50: mol_type = other DNA
tctggaagcttgtaatcacctcagaagccttgtagtccgtggctttcagc

SEQ ID NO: 56348 - DNA, 50 bp, synthetic construct
  source 1..50: mol_type = other DNA
atcggctcggcgaacgccgcccaagtttcgaatgcgcacggcgatctacg

SEQ ID NO: 56349 - DNA, 50 bp, synthetic construct
  source 1..50: mol_type = other DNA
acccaacagatttacgatatgctgttagcaataacccctttctgttaggt

SEQ ID NO: 56350 - DNA, 50 bp, synthetic construct
  source 1..50: mol_type = other DNA
tggaatcattcaggatggatgataattttttattatcttgaataattaca

SEQ ID NO: 56351 - DNA, 50 bp, synthetic construct
  source 1..50: mol_type = other DNA
cgacgcgggtcacggccgtccgccctcacgacgcgcatacggccgggacg

SEQ ID NO: 56352 - DNA, 50 bp, synthetic construct
  source 1..50: mol_type = other DNA
cgaccagccgattaacagtcggctgcaggagatggtcgatcctcaagccc

SEQ ID NO: 56353 - DNA, 50 bp, synthetic construct
  source 1..50: mol_type = other DNA
tcaggtcgactccacgacccaggcaccactattgaccaggattgactgct

SEQ ID NO: 56354 - DNA, 50 bp, synthetic construct
  source 1..50: mol_type = other DNA
gccgcatacggggcaacgccagttgcaacgcgaatggcaatttctgcggt

SEQ ID NO: 56355 - DNA, 50 bp, synthetic construct
  source 1..50: mol_type = other DNA
aggagccaggacacgctcgcttggttgacctcgccgccgtccgggcgggc

SEQ ID NO: 56356 - DNA, 50 bp, synthetic construct
  source 1..50: mol_type = other DNA
accgataacgacacctgcacccgaatagacatctagaggcggttatcggg

SEQ ID NO: 56357 - DNA, 50 bp, synthetic construct
  source 1..50: mol_type = other DNA
atagctaagacaattttactaagtttatttatggaaattaggtgctataa

SEQ ID NO: 56358 - DNA, 50 bp, synthetic construct
  source 1..50: mol_type = other DNA
catagaaggaaacaaggaaatatgcaatattatcctttattcttgctagg

SEQ ID NO: 56359 - DNA, 50 bp, synthetic construct
  source 1..50: mol_type = other DNA
ttccatctttgagtctcgcccggcgtcacggattgctatcaacccatcga

SEQ ID NO: 56360 - DNA, 50 bp, synthetic construct
  source 1..50: mol_type = other DNA
tattatattacgtcgcttaagattataatgaaatttgaaataaatcaata

SEQ ID NO: 56361 - DNA, 50 bp, synthetic construct
  source 1..50: mol_type = other DNA
gctcgcccgtgcatcctgacacggatccgtctcggcgcacgcggacgaac

SEQ ID NO: 56362 - DNA, 50 bp, synthetic construct
  source 1..50: mol_type = other DNA
tacgaagtgccgattcctccgttccgatatcggggtatataaatcaggta

SEQ ID NO: 56363 - DNA, 50 bp, synthetic construct
  source 1..50: mol_type = other DNA
ataagcattgttttctttgttttaaaataaaaaagctaatcattggctat

SEQ ID NO: 56364 - DNA, 50 bp, synthetic construct
  source 1..50: mol_type = other DNA
tcttggtctgtggataccctagcgtactctagcgtatgcacatactctga

SEQ ID NO: 56365 - DNA, 50 bp, synthetic construct
  source 1..50: mol_type = other DNA
aagagatttatttaggtaacttaaatgaaatttacaatgaaaaacagagt

SEQ ID NO: 56366 - DNA, 50 bp, synthetic construct
  source 1..50: mol_type = other DNA
atcttttctctttttttatacggcagtgtgtataatttaaccttgactaa

SEQ ID NO: 56367 - DNA, 50 bp, synthetic construct
  source 1..50: mol_type = other DNA
tcagtatcgcttgttaggattaacagcatcctcataacaagcccaactgc

SEQ ID NO: 56368 - DNA, 50 bp, synthetic construct
  source 1..50: mol_type = other DNA
aagtactacctgtaccagcattattaaccagtacaaagcaggtaagtttg

SEQ ID NO: 56369 - DNA, 50 bp, synthetic construct
  source 1..50: mol_type = other DNA
catgcaattgattatcatttaaagatcgctgaactagattatctggcatc

SEQ ID NO: 56370 - DNA, 50 bp, synthetic construct
  source 1..50: mol_type = other DNA
acagaaatgtaccttatggttatacgtatagctatagttatcatttcgaa

SEQ ID NO: 56371 - DNA, 50 bp, synthetic construct
  source 1..50: mol_type = other DNA
gttcaagcctgtctaaacggcttgaaaaagccgtatatcaccgtttggga

SEQ ID NO: 56372 - DNA, 50 bp, synthetic construct
  source 1..50: mol_type = other DNA
cttaaaaatttatattttgatgatatcctttttattattaaatttcccat

SEQ ID NO: 56373 - DNA, 50 bp, synthetic construct
  source 1..50: mol_type = other DNA
ccgtatagggggcgacagcaaaaatattcgatagttcttttcctaaaagg

SEQ ID NO: 56374 - DNA, 50 bp, synthetic construct
  source 1..50: mol_type = other DNA
tattgaccaggcggtaaagcaactgaaaatgccgtccagcgtgcgagtag

SEQ ID NO: 56375 - DNA, 50 bp, synthetic construct
  source 1..50: mol_type = other DNA
agaattattgcagaaattttgatgatctgcaaatacagtaaaataatttt

SEQ ID NO: 56376 - DNA, 50 bp, synthetic construct
  source 1..50: mol_type = other DNA
gcgcaggcggacttgccgtctggaggtcgcgtcgatcaggatgcggtacc

SEQ ID NO: 56377 - DNA, 50 bp, synthetic construct
  source 1..50: mol_type = other DNA
ccgcaacgcacgacccggctggggcgcccttgcgcgcgcgtcggttgcgc

SEQ ID NO: 56378 - DNA, 50 bp, synthetic construct
  source 1..50: mol_type = other DNA
gcggccccacctccggcaccgggtcgacatggtgccggctgaccggcatt

SEQ ID NO: 56379 - DNA, 50 bp, synthetic construct
  source 1..50: mol_type = other DNA
cagcacttcgccggtcagcgccatcgctggcgctttccccatgagtgaca

SEQ ID NO: 56380 - DNA, 50 bp, synthetic construct
  source 1..50: mol_type = other DNA
tgtccttgccgcggcgcgaactgctgccggttccgttcttatcgtcgaag

SEQ ID NO: 56381 - DNA, 50 bp, synthetic construct
  source 1..50: mol_type = other DNA
cccagcgcagcgcgccggggctttttgaagccaaagcccgcgccggtcat

SEQ ID NO: 56382 - DNA, 50 bp, synthetic construct
  source 1..50: mol_type = other DNA
gggcagcaaacatcgcgatctggcggttgcgatcgcgatagcggcgatag

SEQ ID NO: 56383 - DNA, 50 bp, synthetic construct
  source 1..50: mol_type = other DNA
atgcaatcacttaggagtcatttcaataaaaacccctacaatgattgtgc

SEQ ID NO: 56384 - DNA, 50 bp, synthetic construct
  source 1..50: mol_type = other DNA
cgcggagtgaccgtcgaggagacgcccgtgtcggagacgagcactccgcg

SEQ ID NO: 56385 - DNA, 50 bp, synthetic construct
  source 1..50: mol_type = other DNA
aggccgaggagtatgcgagcgagccggcacggtcggtggcggtgagtgcc

SEQ ID NO: 56386 - DNA, 50 bp, synthetic construct
  source 1..50: mol_type = other DNA
ctgccttcggtagggcggccggtctggaccggccgcccgatccaccgccg

SEQ ID NO: 56387 - DNA, 50 bp, synthetic construct
  source 1..50: mol_type = other DNA
gtatatcatttgaaacctacgttatttaagagaggttcaaaatgaaaccc

SEQ ID NO: 56388 - DNA, 50 bp, synthetic construct
  source 1..50: mol_type = other DNA
cacaaaaaatgaatgaatgaataaaattcttccgttattcttccgtctaa

SEQ ID NO: 56389 - DNA, 50 bp, synthetic construct
  source 1..50: mol_type = other DNA
agcgttactattagcattggtgacgtatcaagatttctaagcgttgtcct

SEQ ID NO: 56390 - DNA, 50 bp, synthetic construct
  source 1..50: mol_type = other DNA
gcttgttaggattcacactaaacttcttccgcctcccggatccggaacag

SEQ ID NO: 56391 - DNA, 50 bp, synthetic construct
  source 1..50: mol_type = other DNA
ccggcagcgctcccgcctcactcggccgagttgcgcggcggcggcgcgct

SEQ ID NO: 56392 - DNA, 50 bp, synthetic construct
  source 1..50: mol_type = other DNA
cccgcctatacggaatcgtcgtcccgggatcacgattagcgcggggcttt

SEQ ID NO: 56393 - DNA, 50 bp, synthetic construct
  source 1..50: mol_type = other DNA
attatcatttaaagatgaacttataaacccattataccatagatgttaat

SEQ ID NO: 56394 - DNA, 50 bp, synthetic construct
  source 1..50: mol_type = other DNA
atgaaacagccagcaaacaagtaaaattactgtactgctgcgtttttgat

SEQ ID NO: 56395 - DNA, 50 bp, synthetic construct
  source 1..50: mol_type = other DNA
gttacattggagaagaaatgatacaaaatggaggtcagtaagaatgtaac

SEQ ID NO: 56396 - DNA, 50 bp, synthetic construct
  source 1..50: mol_type = other DNA
ccaccgctcccgttctctcagcacagaagctgcgcgacggcgagccactc

SEQ ID NO: 56397 - DNA, 50 bp, synthetic construct
  source 1..50: mol_type = other DNA
cggcgaaagagcctcggaaaggtcacaagctgcccgcaagcgagcgttgg

SEQ ID NO: 56398 - DNA, 50 bp, synthetic construct
  source 1..50: mol_type = other DNA
atcctctagcgcggccttgcgcgcaagcgggcgggggcgcataatatgaa

SEQ ID NO: 56399 - DNA, 50 bp, synthetic construct
  source 1..50: mol_type = other DNA
agtcgagaggtgtccgcatgaaaaatagtgtgtttaccttcctggatagc

SEQ ID NO: 56400 - DNA, 50 bp, synthetic construct
  source 1..50: mol_type = other DNA
tttttatcaaagtttcaatataaaatcaacacttatctgattgtcgaaag

SEQ ID NO: 56401 - DNA, 50 bp, synthetic construct
  source 1..50: mol_type = other DNA
tatactttttaatttttttctatatttttagaagaaatttaaaggagtaa

SEQ ID NO: 56402 - DNA, 50 bp, synthetic construct
  source 1..50: mol_type = other DNA
ttttccgggtcgtctacaaagaataagtttattaaagaagggcacgaaag

SEQ ID NO: 56403 - DNA, 50 bp, synthetic construct
  source 1..50: mol_type = other DNA
ttagagctcattaactactaaccttggagtatatacttaatgcgaggcaa

SEQ ID NO: 56404 - DNA, 50 bp, synthetic construct
  source 1..50: mol_type = other DNA
tagaaaaatgcaagtgaaaaactaccgacttattgacttgactatacctt

SEQ ID NO: 56405 - DNA, 50 bp, synthetic construct
  source 1..50: mol_type = other DNA
aaaatgaattgatacacatgtttaaaaggaggtgttcatcatggctaagg

SEQ ID NO: 56406 - DNA, 50 bp, synthetic construct
  source 1..50: mol_type = other DNA
ttccgacattgaaaatgtaccacgttggaaatgcattgtcaaacacggaa

SEQ ID NO: 56407 - DNA, 50 bp, synthetic construct
  source 1..50: mol_type = other DNA
gcctacctgactttatgtattgatagagtttgtcatgactacacgccgtc

SEQ ID NO: 56408 - DNA, 50 bp, synthetic construct
  source 1..50: mol_type = other DNA
tttattttagtgttcaatagtaatgtgataccttggaacactacgataaa

SEQ ID NO: 56409 - DNA, 50 bp, synthetic construct
  source 1..50: mol_type = other DNA
aaatctaggtttatcctaaactgcatgcaatctatcataaagcttaatga

SEQ ID NO: 56410 - DNA, 50 bp, synthetic construct
  source 1..50: mol_type = other DNA
tggagagtacggcggagtttctcactccctataaaccgcctcactgatcg

SEQ ID NO: 56411 - DNA, 50 bp, synthetic construct
  source 1..50: mol_type = other DNA
acgcagccaaggcagcctgagcgtcgtgctgccgatggtcgcggcggcgg

SEQ ID NO: 56412 - DNA, 50 bp, synthetic construct
  source 1..50: mol_type = other DNA
acttgatcatattcttaaaagattgaaacaaaaaaagaatatggaaataa

SEQ ID NO: 56413 - DNA, 50 bp, synthetic construct
  source 1..50: mol_type = other DNA
cccgcgccacagagacatccctccccggtggtgtgctgctgttgcgcaac

SEQ ID NO: 56414 - DNA, 50 bp, synthetic construct
  source 1..50: mol_type = other DNA
cgcctaagcgggacaacaacaacggcacccgcccccgtccctgtccggcg

SEQ ID NO: 56415 - DNA, 50 bp, synthetic construct
  source 1..50: mol_type = other DNA
ccgtggcacttcgacaccaacgagttcttgccggtatcgaattgtggggc

SEQ ID NO: 56416 - DNA, 50 bp, synthetic construct
  source 1..50: mol_type = other DNA
gcgaactctaagccacaaatcagacgccggattatctgattgatggaaat

SEQ ID NO: 56417 - DNA, 50 bp, synthetic construct
  source 1..50: mol_type = other DNA
aggccgagacgagcgccgcggtcgcgatgagatcgcgaaactctcggctt

SEQ ID NO: 56418 - DNA, 50 bp, synthetic construct
  source 1..50: mol_type = other DNA
aaaaaattaatccgctccagcatctggatcatgaggcggattaattaccc

SEQ ID NO: 56419 - DNA, 50 bp, synthetic construct
  source 1..50: mol_type = other DNA
tcgatgtcgtcgagttcctcctgctcgcgataagatcgcgaaactctcgg

SEQ ID NO: 56420 - DNA, 50 bp, synthetic construct
  source 1..50: mol_type = other DNA
tcgccacacgcgatcgaaaaccggacatagtttttcatggcgtcagaatc

SEQ ID NO: 56421 - DNA, 50 bp, synthetic construct
  source 1..50: mol_type = other DNA
tcaccatggtcaatatcggcgtcggccctaaccatgctacagccccgtga

SEQ ID NO: 56422 - DNA, 50 bp, synthetic construct
  source 1..50: mol_type = other DNA
ccgatactactctgtagagttaaagttttacggaatgtgatgagtgcata

SEQ ID NO: 56423 - DNA, 50 bp, synthetic construct
  source 1..50: mol_type = other DNA
ccctactcaaggttgctgcggatgcgctgtacctgcatccgccgcaagac

SEQ ID NO: 56424 - DNA, 50 bp, synthetic construct
  source 1..50: mol_type = other DNA
ctgcggtattttttctaattgaacttttattccttggaaaaatatcggca

SEQ ID NO: 56425 - DNA, 50 bp, synthetic construct
  source 1..50: mol_type = other DNA
aatatctttcttgatttctccccatctggggaaacatcctcatagatgga

SEQ ID NO: 56426 - DNA, 50 bp, synthetic construct
  source 1..50: mol_type = other DNA
ttatcaaaaaatattgcttttgactgcggtgctgccctataccctgatac

SEQ ID NO: 56427 - DNA, 50 bp, synthetic construct
  source 1..50: mol_type = other DNA
agcgttccaatagtttctgctgagatccaccgagaaatagcgggaaatta

SEQ ID NO: 56428 - DNA, 50 bp, synthetic construct
  source 1..50: mol_type = other DNA
caacatggacagctgtgaaaccatgaatcctctccggactgcccgtattc

SEQ ID NO: 56429 - DNA, 50 bp, synthetic construct
  source 1..50: mol_type = other DNA
ttcttgtctcctttcataggctctttagagagtatgaaagccataaaaca

SEQ ID NO: 56430 - DNA, 50 bp, synthetic construct
  source 1..50: mol_type = other DNA
ttatcgacctcctcctgaaactttcgctttgcaatggaagcggtcggcaa

SEQ ID NO: 56431 - DNA, 50 bp, synthetic construct
  source 1..50: mol_type = other DNA
cagctgctcggcaagatcgcaaaagcttttcttatttccgagcatggctg

SEQ ID NO: 56432 - DNA, 50 bp, synthetic construct
  source 1..50: mol_type = other DNA
aaaaaatatcaaaaaagttaaagaaaaagttaaggagaagcatattatgg

SEQ ID NO: 56433 - DNA, 50 bp, synthetic construct
  source 1..50: mol_type = other DNA
tgccgtgtatcaacggatcaggaagatgatagacggaatgccacacgagg

SEQ ID NO: 56434 - DNA, 50 bp, synthetic construct
  source 1..50: mol_type = other DNA
catatccatccggtcagcatcgtcctgattttggtgataaggaatatgtg

SEQ ID NO: 56435 - DNA, 50 bp, synthetic construct
  source 1..50: mol_type = other DNA
acattgttgatgcttcatgtaattatcacggcatgacgggaaataaaagg

SEQ ID NO: 56436 - DNA, 50 bp, synthetic construct
  source 1..50: mol_type = other DNA
tgcttgcacggcaaacggcggacaaatgccctccggcagacggtcaaggt

SEQ ID NO: 56437 - DNA, 50 bp, synthetic construct
  source 1..50: mol_type = other DNA
tatttccgcgaacaagggagaaaaagtattccacctttttctgtaaagtg

SEQ ID NO: 56438 - DNA, 50 bp, synthetic construct
  source 1..50: mol_type = other DNA
aactatgtgccgtgttaactacccaagtgagcaaaacaccaatggggtca

SEQ ID NO: 56439 - DNA, 50 bp, synthetic construct
  source 1..50: mol_type = other DNA
tcacatattagctctgaaagccttataaagctgtcggagcttagtggtag

SEQ ID NO: 56440 - DNA, 50 bp, synthetic construct
  source 1..50: mol_type = other DNA
tttctgcaccgtggtgcggtccatgcacgccccggaccacggtacccaaa

SEQ ID NO: 56441 - DNA, 50 bp, synthetic construct
  source 1..50: mol_type = other DNA
gttttggcgggggatactcttgtgtacttacagaaaatcaaattcaatcc

SEQ ID NO: 56442 - DNA, 50 bp, synthetic construct
  source 1..50: mol_type = other DNA
aaacacaaacagaaacgaaaaaaattttgtgattctttctgttacagaaa

SEQ ID NO: 56443 - DNA, 50 bp, synthetic construct
  source 1..50: mol_type = other DNA
cattctgcatatcatcgttttctgaataaaacgcccggatcatcgggcat

SEQ ID NO: 56444 - DNA, 50 bp, synthetic construct
  source 1..50: mol_type = other DNA
ttttgccatgcttttttctcctttccaatagagcaagtcgaacttttaac

SEQ ID NO: 56445 - DNA, 50 bp, synthetic construct
  source 1..50: mol_type = other DNA
cgcaaaacgaacactatttaatactggtattaaaggatgatcagcagaaa

SEQ ID NO: 56446 - DNA, 50 bp, synthetic construct
  source 1..50: mol_type = other DNA
gatcgaaatactatcttatcagaagattctgatatgacaccgtttcctaa

SEQ ID NO: 56447 - DNA, 50 bp, synthetic construct
  source 1..50: mol_type = other DNA
taatcatgaagaaaaaaagatacttgagtaatgacattctttcatggata

SEQ ID NO: 56448 - DNA, 50 bp, synthetic construct
  source 1..50: mol_type = other DNA
tcagacagagcttgcgcggcgtaagctgctttcagaggtaatatgtcata

SEQ ID NO: 56449 - DNA, 50 bp, synthetic construct
  source 1..50: mol_type = other DNA
ttctgtcacctcattagtcttggacaaacatgagcaatgaaatgtttcta

SEQ ID NO: 56450 - DNA, 50 bp, synthetic construct
  source 1..50: mol_type = other DNA
taaaaacaaagggtataagaatcgatcttttttaatagcccccaatttta

SEQ ID NO: 56451 - DNA, 50 bp, synthetic construct
  source 1..50: mol_type = other DNA
gctgcatcattttttatcacttcctttgagctgcggaagaatgacagagg

SEQ ID NO: 56452 - DNA, 50 bp, synthetic construct
  source 1..50: mol_type = other DNA
ggttttttgtatataatacaaaagtactgttaaatcactagcaaaattat

SEQ ID NO: 56453 - DNA, 50 bp, synthetic construct
  source 1..50: mol_type = other DNA
atcagggtatgcttataaatatcggtaccactctatacgcataccgtttc

SEQ ID NO: 56454 - DNA, 50 bp, synthetic construct
  source 1..50: mol_type = other DNA
ccgatcagggtatgcttataaatatcctgatccgtagataccctgcagta

SEQ ID NO: 56455 - DNA, 50 bp, synthetic construct
  source 1..50: mol_type = other DNA
gcaattttttccgcgcaaaataattaacttttcggcacgatcaaggcccc

SEQ ID NO: 56456 - DNA, 50 bp, synthetic construct
  source 1..50: mol_type = other DNA
atgaaacgtggaaccggttgaacgatcttgcagaggcttctctggaggag

SEQ ID NO: 56457 - DNA, 50 bp, synthetic construct
  source 1..50: mol_type = other DNA
cttttttcttttttcgtttgacaatattatggaacaacaactcaaacggg

SEQ ID NO: 56458 - DNA, 50 bp, synthetic construct
  source 1..50: mol_type = other DNA
gttagaggcgatcgacctgcattataaggtcaaggtcgaagtggtcgact

SEQ ID NO: 56459 - DNA, 50 bp, synthetic construct
  source 1..50: mol_type = other DNA
aatttctgccactcctttctctttggaaaatgaacagcgtgttgccgtat

SEQ ID NO: 56460 - DNA, 50 bp, synthetic construct
  source 1..50: mol_type = other DNA
cctgacgtgatggagtggatcgcggatgctctcatatccaaataaaaagc

SEQ ID NO: 56461 - DNA, 50 bp, synthetic construct
  source 1..50: mol_type = other DNA
ggtgcgttcggtatggaaggtcagttctggagtaccataacgacgaaatt

SEQ ID NO: 56462 - DNA, 50 bp, synthetic construct
  source 1..50: mol_type = other DNA
aagcaactccagagctgatagaagtaggtttttcagctttggtgatgcta

SEQ ID NO: 56463 - DNA, 50 bp, synthetic construct
  source 1..50: mol_type = other DNA
tgctcatccgcctgtaaccatctgcacaggccgttaatcctgtgggcttt

SEQ ID NO: 56464 - DNA, 50 bp, synthetic construct
  source 1..50: mol_type = other DNA
taacatctgcgaggtctgttattgctctgcttccgaccccgtgttcggcg

SEQ ID NO: 56465 - DNA, 50 bp, synthetic construct
  source 1..50: mol_type = other DNA
ttccaccaatgccaaagtactatatctccccgttttgggctgagattatg

SEQ ID NO: 56466 - DNA, 50 bp, synthetic construct
  source 1..50: mol_type = other DNA
gaaacaaagactatatctaccttatcaaatgcaataaaaatctgcttttc

SEQ ID NO: 56467 - DNA, 50 bp, synthetic construct
  source 1..50: mol_type = other DNA
tatagttatcctgtttagccatactcattaggataaacaagataactata

SEQ ID NO: 56468 - DNA, 50 bp, synthetic construct
  source 1..50: mol_type = other DNA
catcccggccacgctgacgcgctttacgaagtcctgtattcatttgaaat

SEQ ID NO: 56469 - DNA, 50 bp, synthetic construct
  source 1..50: mol_type = other DNA
gcactctggcggttttcattccgttggtggtcgtgttgccgccaggcctc

SEQ ID NO: 56470 - DNA, 50 bp, synthetic construct
  source 1..50: mol_type = other DNA
attatcctctacctcttttatattagaatattactgaggattttttatat

SEQ ID NO: 56471 - DNA, 50 bp, synthetic construct
  source 1..50: mol_type = other DNA
agccgataaaaacggatgcgcctgtacaggaacattgacagatatcggca

SEQ ID NO: 56472 - DNA, 50 bp, synthetic construct
  source 1..50: mol_type = other DNA
ggtgtttttctcttttcggatattttccggggcgaaaagagtgatgtata

SEQ ID NO: 56473 - DNA, 50 bp, synthetic construct
  source 1..50: mol_type = other DNA
gtgtttttctcttttcggatattttgtaaaacccgactatgaaaaaatgg

SEQ ID NO: 56474 - DNA, 50 bp, synthetic construct
  source 1..50: mol_type = other DNA
attttaaatgtattataaaaagttgtaactatgaatggaagatttataag

SEQ ID NO: 56475 - DNA, 50 bp, synthetic construct
  source 1..50: mol_type = other DNA
ttctgtccgcgctgaaccgtgccggacctttcgggaggcagcggacagag

SEQ ID NO: 56476 - DNA, 50 bp, synthetic construct
  source 1..50: mol_type = other DNA
catccatataaaatcgggtttttacggcgttttagcggttttaccgtttg

SEQ ID NO: 56477 - DNA, 50 bp, synthetic construct
  source 1..50: mol_type = other DNA
caatgctttcacctccgctctcctatagggttctcgattcgaaatgcgat

SEQ ID NO: 56478 - DNA, 50 bp, synthetic construct
  source 1..50: mol_type = other DNA
tcatctgggtttgcccattccgagaaaaaagttctaacaaaagaagatta

SEQ ID NO: 56479 - DNA, 50 bp, synthetic construct
  source 1..50: mol_type = other DNA
ataccggtggaactatgtttgataaaaaggtcacacagcgatctgtgttg

SEQ ID NO: 56480 - DNA, 50 bp, synthetic construct
  source 1..50: mol_type = other DNA
tgcaccgcgactgggactcctatatcaatcggagaggctgaatgagcgca

SEQ ID NO: 56481 - DNA, 50 bp, synthetic construct
  source 1..50: mol_type = other DNA
tacggcgccggattcgttgtcttggtgaccatcagccaaccggcgtcgtg

SEQ ID NO: 56482 - DNA, 50 bp, synthetic construct
  source 1..50: mol_type = other DNA
acaaattaattttactgtatctactaataacaaatcccgaattaattttg

SEQ ID NO: 56483 - DNA, 50 bp, synthetic construct
  source 1..50: mol_type = other DNA
tgtaccggcggtcggtaatatagaaatgactgtgaccgaccgtgctgctg

SEQ ID NO: 56484 - DNA, 50 bp, synthetic construct
  source 1..50: mol_type = other DNA
attttcgcgcagccgtgtttattatatcataaagcctcccaatgccaaag

SEQ ID NO: 56485 - DNA, 50 bp, synthetic construct
  source 1..50: mol_type = other DNA
accctgtcgccgtctaaaaaaattttggttaaaaagaaaatctgggctta

SEQ ID NO: 56486 - DNA, 50 bp, synthetic construct
  source 1..50: mol_type = other DNA
gcttcacctctgcggcgatagaggcgcctgttcgtcctcataggtcttgc

SEQ ID NO: 56487 - DNA, 50 bp, synthetic construct
  source 1..50: mol_type = other DNA
accagaaaacaggtaagtatttttgaaaaaatggttactgctttcaaata

SEQ ID NO: 56488 - DNA, 50 bp, synthetic construct
  source 1..50: mol_type = other DNA
ggcgtgcctgctcgtcgtgtcgctggcacgaaatagaaaggggcagacaa

SEQ ID NO: 56489 - DNA, 50 bp, synthetic construct
  source 1..50: mol_type = other DNA
acaatcaaagctgtgtgatcgtgggcccacgatgatattatgtcctttta

SEQ ID NO: 56490 - DNA, 50 bp, synthetic construct
  source 1..50: mol_type = other DNA
gtggtaagcggtttagttgtgcatatacattatacgaaacagtgctttga

SEQ ID NO: 56491 - DNA, 50 bp, synthetic construct
  source 1..50: mol_type = other DNA
ttagcggtcattttgtatttacctccactacaaaaggcattgaccttatg

SEQ ID NO: 56492 - DNA, 50 bp, synthetic construct
  source 1..50: mol_type = other DNA
catgacggcagtactcgtcgagacggaactcgaggagctggaccgtcagc

SEQ ID NO: 56493 - DNA, 50 bp, synthetic construct
  source 1..50: mol_type = other DNA
gcgtgaatacctacagcatcacattaatgtgaccttaattgtctttttaa

SEQ ID NO: 56494 - DNA, 50 bp, synthetic construct
  source 1..50: mol_type = other DNA
atacaaactcattgtggtaggccagctgaccgtacaccgctggtttgcca

SEQ ID NO: 56495 - DNA, 50 bp, synthetic construct
  source 1..50: mol_type = other DNA
gtcagatctctgtggagacgccggcaccgccgtatccgcgaaggccagct

SEQ ID NO: 56496 - DNA, 50 bp, synthetic construct
  source 1..50: mol_type = other DNA
tttcatgtgcgaatccagccgattgaaaagcagttgattccaaaatgaaa

SEQ ID NO: 56497 - DNA, 50 bp, synthetic construct
  source 1..50: mol_type = other DNA
taagtatggcacaggatatgcgcagaatccgctatgctccaccattttta

SEQ ID NO: 56498 - DNA, 50 bp, synthetic construct
  source 1..50: mol_type = other DNA
attttccgataataatgtacccaaagatgagtaaagcttttccacaggtg

SEQ ID NO: 56499 - DNA, 50 bp, synthetic construct
  source 1..50: mol_type = other DNA
ccgaaaaaaaacatacggaaaatggaaattttctgtgttcgcttttttct

SEQ ID NO: 56500 - DNA, 50 bp, synthetic construct
  source 1..50: mol_type = other DNA
ggcccggagccgctttcatgtggttctacgagcgaaaaatgctcaaagat

SEQ ID NO: 56501 - DNA, 50 bp, synthetic construct
  source 1..50: mol_type = other DNA
catagggaggaagtcccatcggttcgagattggggggttcaaatcccctc

SEQ ID NO: 56502 - DNA, 50 bp, synthetic construct
  source 1..50: mol_type = other DNA
taccgttgtcctcgcggtacagttcgatttacaccgcattttcaacggtc

SEQ ID NO: 56503 - DNA, 50 bp, synthetic construct
  source 1..50: mol_type = other DNA
tcgacagatgactgctgcgtctgatttcagagtgatatatagactaccaa

SEQ ID NO: 56504 - DNA, 50 bp, synthetic construct
  source 1..50: mol_type = other DNA
gttcttccagacggaaggatggggcagttcagaatcgctaacttctatat

SEQ ID NO: 56505 - DNA, 50 bp, synthetic construct
  source 1..50: mol_type = other DNA
gggcggccactcttttttattccatttgcaataatggcaaggctccgcgg

SEQ ID NO: 56506 - DNA, 50 bp, synthetic construct
  source 1..50: mol_type = other DNA
aggtcggggccatcttatgcagtctataatcttgccgatggcctcgaaca

SEQ ID NO: 56507 - DNA, 50 bp, synthetic construct
  source 1..50: mol_type = other DNA
gaccagctccacagttttgaggcacaccatcaaaggacagataaagtccg

SEQ ID NO: 56508 - DNA, 50 bp, synthetic construct
  source 1..50: mol_type = other DNA
tcgcatccccgggttcaggaatgtcgtctgtccggacggaagggtgcatg

SEQ ID NO: 56509 - DNA, 50 bp, synthetic construct
  source 1..50: mol_type = other DNA
cacgacgccggttggctgatggtcaccaagacaacgaatccggcgccgta

SEQ ID NO: 56510 - DNA, 50 bp, synthetic construct
  source 1..50: mol_type = other DNA
actttttccgtaatattcttgatccttttcaacgtcgttaccacaagagt

SEQ ID NO: 56511 - DNA, 50 bp, synthetic construct
  source 1..50: mol_type = other DNA
gcggcatatgggaaagagcttcctcaaacaagccttttcttcattggtac

SEQ ID NO: 56512 - DNA, 50 bp, synthetic construct
  source 1..50: mol_type = other DNA
ttacggacggctgccagatataatttggacttcatgacagcggggtttcc

SEQ ID NO: 56513 - DNA, 50 bp, synthetic construct
  source 1..50: mol_type = other DNA
tgtctgaattgacaccccttttgacatcgaaaccgctgtactttcagcgt

SEQ ID NO: 56514 - DNA, 50 bp, synthetic construct
  source 1..50: mol_type = other DNA
cctggtagagatattctgcgtacacgtttcctcttggattctctgccgta

SEQ ID NO: 56515 - DNA, 50 bp, synthetic construct
  source 1..50: mol_type = other DNA
ttcgcaggggcatcgaattggaaaagccaccaaatcctcaataatgcgaa

SEQ ID NO: 56516 - DNA, 50 bp, synthetic construct
  source 1..50: mol_type = other DNA
atactgaggtcggggccatcttatgccggctcatagccatctctccttca

SEQ ID NO: 56517 - DNA, 50 bp, synthetic construct
  source 1..50: mol_type = other DNA
atttggggtgcttctttttgtttcaaacccggctgacagaggcagcaaat

SEQ ID NO: 56518 - DNA, 50 bp, synthetic construct
  source 1..50: mol_type = other DNA
gcatttcctgcaatcatagacaaagagcgaactatgaaaaaagcggtaat

SEQ ID NO: 56519 - DNA, 50 bp, synthetic construct
  source 1..50: mol_type = other DNA
atgcaaaaagttctttctcctccatcatcatgagaaataaatcattggca

SEQ ID NO: 56520 - DNA, 50 bp, synthetic construct
  source 1..50: mol_type = other DNA
taaaatttattcgtagagtttacagccatccaggccatgaatcagctttg

SEQ ID NO: 56521 - DNA, 50 bp, synthetic construct
  source 1..50: mol_type = other DNA
accgcccacatcaatatggtaaattccattacccgacggatattctgggt

SEQ ID NO: 56522 - DNA, 50 bp, synthetic construct
  source 1..50: mol_type = other DNA
ttaatccccaccgtacctattctttttgtgtcctctacggagaagtttga

SEQ ID NO: 56523 - DNA, 50 bp, synthetic construct
  source 1..50: mol_type = other DNA
catctgaacctccctcggcttttctgaactggccgacggacgccctgatt

SEQ ID NO: 56524 - DNA, 50 bp, synthetic construct
  source 1..50: mol_type = other DNA
tcggcaaaatcgactgacctttcttttgaaacatcccacgatgcggagtt

SEQ ID NO: 56525 - DNA, 50 bp, synthetic construct
  source 1..50: mol_type = other DNA
cgtccgtccggagcgcagctgatagaaatcaccgtgcgtatcaccggtta

SEQ ID NO: 56526 - DNA, 50 bp, synthetic construct
  source 1..50: mol_type = other DNA
ctgtgggagggccgtaataaagtctgcggttgatcatcttgccgccacct

SEQ ID NO: 56527 - DNA, 50 bp, synthetic construct
  source 1..50: mol_type = other DNA
ccatgcaaaacgtctttccactgcggacagagaaagcagattgtgttata

SEQ ID NO: 56528 - DNA, 50 bp, synthetic construct
  source 1..50: mol_type = other DNA
atttccacaagccatgcctcctttcgagcagaaagccggctcagttgccg

SEQ ID NO: 56529 - DNA, 50 bp, synthetic construct
  source 1..50: mol_type = other DNA
gtgtggctctggtcgatgtcaaagcccgcaagcggtcaaacctgcgggct

SEQ ID NO: 56530 - DNA, 50 bp, synthetic construct
  source 1..50: mol_type = other DNA
gaaatccctggagcctcgcgcattcgaactgtcgcggtgctcatttttgt

SEQ ID NO: 56531 - DNA, 50 bp, synthetic construct
  source 1..50: mol_type = other DNA
tggccagaaatgctgtggtgcgccggtgcggatttttgcattaccgaccg

SEQ ID NO: 56532 - DNA, 50 bp, synthetic construct
  source 1..50: mol_type = other DNA
agcaccgcacggaaacgtgtggtgtttaccatattgatgtgggcggtgat

SEQ ID NO: 56533 - DNA, 50 bp, synthetic construct
  source 1..50: mol_type = other DNA
ataatttgtatctgtcagcaagggtgattttgcggatgtttatattttcc

SEQ ID NO: 56534 - DNA, 50 bp, synthetic construct
  source 1..50: mol_type = other DNA
agacagaacatgaaactgtttgattccagagccgttatacggttatgtcg

SEQ ID NO: 56535 - DNA, 50 bp, synthetic construct
  source 1..50: mol_type = other DNA
agtctgttttaaaactatcacaatagattccgaacttttttgtatctttc

SEQ ID NO: 56536 - DNA, 50 bp, synthetic construct
  source 1..50: mol_type = other DNA
ggtgcatatatcgatgatgattttgatttaacatcacatccccttgcgat

SEQ ID NO: 56537 - DNA, 50 bp, synthetic construct
  source 1..50: mol_type = other DNA
aatcttaatcataatgatgtcaatagatagaaataattacaaggcagatt

SEQ ID NO: 56538 - DNA, 50 bp, synthetic construct
  source 1..50: mol_type = other DNA
ttgcattatttattttacaacttcatgaagtatgcggcacaaaaagccaa

SEQ ID NO: 56539 - DNA, 50 bp, synthetic construct
  source 1..50: mol_type = other DNA
gcatgatgcggcttcttgctatctatggacagctccgcgccgtcgccgtc

SEQ ID NO: 56540 - DNA, 50 bp, synthetic construct
  source 1..50: mol_type = other DNA
tttttatggaaacaacaattactaaaaagctgtcgctgtttttgtcaaaa

SEQ ID NO: 56541 - DNA, 50 bp, synthetic construct
  source 1..50: mol_type = other DNA
catgacagcaaaaagctactcttatcgtatagtttgtttttggtgccgta

SEQ ID NO: 56542 - DNA, 50 bp, synthetic construct
  source 1..50: mol_type = other DNA
gcataaatgattgcacctttcatttttatcaaacgttttgtagtttattg

SEQ ID NO: 56543 - DNA, 50 bp, synthetic construct
  source 1..50: mol_type = other DNA
aaaattttaaaaaatcgttcattcttgtgctaaaaattttttaattgaat

SEQ ID NO: 56544 - DNA, 50 bp, synthetic construct
  source 1..50: mol_type = other DNA
gctttcctcattgctggcccttatctgttgacttactcacaattagaagt

SEQ ID NO: 56545 - DNA, 50 bp, synthetic construct
  source 1..50: mol_type = other DNA
aagcattgcagaacatgcaaatatgcattattcagtgttctgatggtttt

SEQ ID NO: 56546 - DNA, 50 bp, synthetic construct
  source 1..50: mol_type = other DNA
gaaaatatttatagacttcgaaaaaatttcaatcaccctaacataattta

SEQ ID NO: 56547 - DNA, 50 bp, synthetic construct
  source 1..50: mol_type = other DNA
ttcagtatggacatattcccgtactagttagcaagaaaagttatacattc

SEQ ID NO: 56548 - DNA, 50 bp, synthetic construct
  source 1..50: mol_type = other DNA
ccctgcccgcagcgggcacgttctacgtgcgcatccttctgcggtgggga

SEQ ID NO: 56549 - DNA, 50 bp, synthetic construct
  source 1..50: mol_type = other DNA
catacttcgatgaagtcgacgatccgatggggttactccaattacaataa

SEQ ID NO: 56550 - DNA, 50 bp, synthetic construct
  source 1..50: mol_type = other DNA
tttgtcacctcctcgtagtgtgacatatcacactctaaaattaatgtcaa

SEQ ID NO: 56551 - DNA, 50 bp, synthetic construct
  source 1..50: mol_type = other DNA
atgcggtttttgcaaattttgtgtagggtaaatttttgcaaaaaagaatg

SEQ ID NO: 56552 - DNA, 50 bp, synthetic construct
  source 1..50: mol_type = other DNA
agccactaccggtatcaaaaacggaaattttttgcccttttttactgttt

SEQ ID NO: 56553 - DNA, 50 bp, synthetic construct
  source 1..50: mol_type = other DNA
gaaaaagacgctctggatgcgaaaattttaccatagacagcccctttttt

SEQ ID NO: 56554 - DNA, 50 bp, synthetic construct
  source 1..50: mol_type = other DNA
aaaaattgctgctttgagaaaataattgattttcacaacagcgaatttgg

SEQ ID NO: 56555 - DNA, 50 bp, synthetic construct
  source 1..50: mol_type = other DNA
atgttagaaagatacctgcatcagtactgaatcagaaaactttgaaatct

SEQ ID NO: 56556 - DNA, 50 bp, synthetic construct
  source 1..50: mol_type = other DNA
ttttgagcaaatgtaaaagtttgctttgaaatcttgctatttgcttattc

SEQ ID NO: 56557 - DNA, 50 bp, synthetic construct
  source 1..50: mol_type = other DNA
gcgtgaatacctacagtatcacattaatgtgaccttaattgtctttttaa

SEQ ID NO: 56558 - DNA, 50 bp, synthetic construct
  source 1..50: mol_type = other DNA
tgagaggagcgaattatgaagactgtttgcttataaagtttctcttaccg

SEQ ID NO: 56559 - DNA, 50 bp, synthetic construct
  source 1..50: mol_type = other DNA
cggcgggctgccggttgcttcggtctgctgctgcaaacggcaaagcgccc

SEQ ID NO: 56560 - DNA, 50 bp, synthetic construct
  source 1..50: mol_type = other DNA
cccctgcagaatgtcactccttttcggaaacctcattattaatgaagggg

SEQ ID NO: 56561 - DNA, 50 bp, synthetic construct
  source 1..50: mol_type = other DNA
gccaataatagcaagtgttttctttgaacgaaaacgagcagaaagccggc

SEQ ID NO: 56562 - DNA, 50 bp, synthetic construct
  source 1..50: mol_type = other DNA
cctacggatacaaaattgtgaatggagattctcaaataatttgttatagg

SEQ ID NO: 56563 - DNA, 50 bp, synthetic construct
  source 1..50: mol_type = other DNA
gttacggtatcatcggtcagtgcttgttctgacaccaatgaaaaagcatg

SEQ ID NO: 56564 - DNA, 50 bp, synthetic construct
  source 1..50: mol_type = other DNA
atctgttatcagctgaatcacaattagctgttacttttctttgcgccaat

SEQ ID NO: 56565 - DNA, 50 bp, synthetic construct
  source 1..50: mol_type = other DNA
taattccttttgttcgcttgcccttaaggtctttttaccaaaaagaacaa

SEQ ID NO: 56566 - DNA, 50 bp, synthetic construct
  source 1..50: mol_type = other DNA
gctgtcggcgaggtcgtcaaaggacaggctgtgtaagcctgcggactttt

SEQ ID NO: 56567 - DNA, 50 bp, synthetic construct
  source 1..50: mol_type = other DNA
tcactatcaaacctccgaataataaatatgcgtcaaagggttgatggtcg

SEQ ID NO: 56568 - DNA, 50 bp, synthetic construct
  source 1..50: mol_type = other DNA
cgtgtaaaatgcgcttaagtcttgtttcagaggtaatatgtgacactgac

SEQ ID NO: 56569 - DNA, 50 bp, synthetic construct
  source 1..50: mol_type = other DNA
gattgatggtcgggagggctattgctttgcagaactcattgccaccaaaa

SEQ ID NO: 56570 - DNA, 50 bp, synthetic construct
  source 1..50: mol_type = other DNA
ggcgtagattacggcggtcatgcaaacaaaaaaccagcgtaatttctacg

SEQ ID NO: 56571 - DNA, 50 bp, synthetic construct
  source 1..50: mol_type = other DNA
tagcctttataaacactcggtacttaaagcacacctggaattcttcaggt

SEQ ID NO: 56572 - DNA, 50 bp, synthetic construct
  source 1..50: mol_type = other DNA
tattcggaagtcaaaattttatgttgttataattgctatcattccgtgta

SEQ ID NO: 56573 - DNA, 50 bp, synthetic construct
  source 1..50: mol_type = other DNA
ctcgaaatgataggctctatagtatcacccgtagaggctttcatatcacc

SEQ ID NO: 56574 - DNA, 50 bp, synthetic construct
  source 1..50: mol_type = other DNA
ggcagaatacctctacggcctcatagagtgatgtatagacgtacggaaag

SEQ ID NO: 56575 - DNA, 50 bp, synthetic construct
  source 1..50: mol_type = other DNA
tttttctttttgatttgtcattttattatatcacaaatcaaaatcagaag

SEQ ID NO: 56576 - DNA, 50 bp, synthetic construct
  source 1..50: mol_type = other DNA
tgtcacatattagctctgaatccctttataaccaaatggcgtatgtccca

SEQ ID NO: 56577 - DNA, 50 bp, synthetic construct
  source 1..50: mol_type = other DNA
ttcatctgtccatgattccgaacgggaaagcggaatccgccgcacgcacg

SEQ ID NO: 56578 - DNA, 50 bp, synthetic construct
  source 1..50: mol_type = other DNA
ctgtctgccattcccgtcacctccttgacggttgccggtattacggtaac

SEQ ID NO: 56579 - DNA, 50 bp, synthetic construct
  source 1..50: mol_type = other DNA
tcttggggtagaaactatacgtgaaagcagagatagaaatcattacaagg

SEQ ID NO: 56580 - DNA, 50 bp, synthetic construct
  source 1..50: mol_type = other DNA
tgtgttacgcaaatgtactggataccgcttcagaggcgatttaaggcacg

SEQ ID NO: 56581 - DNA, 50 bp, synthetic construct
  source 1..50: mol_type = other DNA
tgattccattaattcagtgactttctaaacaggatttagaaaaatattct

SEQ ID NO: 56582 - DNA, 50 bp, synthetic construct
  source 1..50: mol_type = other DNA
gtaattatcaagttatatatccatcaaaaattctatgatttgatgccgta

SEQ ID NO: 56583 - DNA, 50 bp, synthetic construct
  source 1..50: mol_type = other DNA
taaagttgctgggttatttaaaaatgctttttatttacctgataaaggtt

SEQ ID NO: 56584 - DNA, 50 bp, synthetic construct
  source 1..50: mol_type = other DNA
ggctgaatatatccttcagtataggctgatactgctggatataacctgct

SEQ ID NO: 56585 - DNA, 50 bp, synthetic construct
  source 1..50: mol_type = other DNA
taggcttgctgaagcacatatcctcgccagcgtgcgctacaggcaaggag

SEQ ID NO: 56586 - DNA, 50 bp, synthetic construct
  source 1..50: mol_type = other DNA
ataaaaaaatcagctcctttttagaagcgtcgctttcctgcttttttagc

SEQ ID NO: 56587 - DNA, 50 bp, synthetic construct
  source 1..50: mol_type = other DNA
taattcaagatgagtcaataaaatattgcaaatgcactaaaatagcggct

SEQ ID NO: 56588 - DNA, 50 bp, synthetic construct
  source 1..50: mol_type = other DNA
gctgtcccaggacttccagactatatatgatctaccagatacaacatacc

SEQ ID NO: 56589 - DNA, 50 bp, synthetic construct
  source 1..50: mol_type = other DNA
aacaaaatggcattgatccggctaaggagatgataccatgaccgacaaga

SEQ ID NO: 56590 - DNA, 50 bp, synthetic construct
  source 1..50: mol_type = other DNA
tttgaaactttgaagcagaagtataaatggagctgcatcaaagcgccagc

SEQ ID NO: 56591 - DNA, 50 bp, synthetic construct
  source 1..50: mol_type = other DNA
tgtttcatatcttcaacctcccttcgagtgttcttatagcatttgaaagg

SEQ ID NO: 56592 - DNA, 50 bp, synthetic construct
  source 1..50: mol_type = other DNA
agagtttgttgaagatttggtaattaatgacttaatgggaaatccgctgg

SEQ ID NO: 56593 - DNA, 50 bp, synthetic construct
  source 1..50: mol_type = other DNA
aatattcatctgtgacctttaaagatcagtaaagttaaacaaggagaaaa

SEQ ID NO: 56594 - DNA, 50 bp, synthetic construct
  source 1..50: mol_type = other DNA
agatattagagaatatagaagatattgccattctcgattcggtaaccgta

SEQ ID NO: 56595 - DNA, 50 bp, synthetic construct
  source 1..50: mol_type = other DNA
cccgaaagcatatcttcgggaaaatcatgtcgattagtgttattttttgc

SEQ ID NO: 56596 - DNA, 50 bp, synthetic construct
  source 1..50: mol_type = other DNA
gaaagtcctgttggcataataaactgaaagactatgccaaaagaaacggt

SEQ ID NO: 56597 - DNA, 50 bp, synthetic construct
  source 1..50: mol_type = other DNA
cttggatattgtccattggtcttacatatcgatagttgtcaatatggttt

SEQ ID NO: 56598 - DNA, 50 bp, synthetic construct
  source 1..50: mol_type = other DNA
ttcttggtaggtcacatattacctccgtgtttcatctgacatagccttaa

SEQ ID NO: 56599 - DNA, 50 bp, synthetic construct
  source 1..50: mol_type = other DNA
ttagcgctggagttattggaaatatatatgtgtaataacagtagctattc

SEQ ID NO: 56600 - DNA, 50 bp, synthetic construct
  source 1..50: mol_type = other DNA
aaagaaagatgcacatctttatgaatctataaagatggacgagttgaaat

SEQ ID NO: 56601 - DNA, 50 bp, synthetic construct
  source 1..50: mol_type = other DNA
tcaattctataatacagaataaaacctgtaaagtattattatcaaatgac

SEQ ID NO: 56602 - DNA, 50 bp, synthetic construct
  source 1..50: mol_type = other DNA
tgtcgatacgcgagcgtcttcttgtacaatgcgaatgtagcgcgctggca

SEQ ID NO: 56603 - DNA, 50 bp, synthetic construct
  source 1..50: mol_type = other DNA
ggcaaagtcgattcggcggaggaggccatcgccaccgaaatcaccggaac

SEQ ID NO: 56604 - DNA, 50 bp, synthetic construct
  source 1..50: mol_type = other DNA
taacggttcccatgagtttgcggacagccgcaaacgcggacaatgggtgg

SEQ ID NO: 56605 - DNA, 50 bp, synthetic construct
  source 1..50: mol_type = other DNA
taagtttttatgatatatttatatggatacagctatgaagggaaaacttc

SEQ ID NO: 56606 - DNA, 50 bp, synthetic construct
  source 1..50: mol_type = other DNA
gtgtttttttatgttttaaagtcattatattttaaacaatttaaaaaaag

SEQ ID NO: 56607 - DNA, 50 bp, synthetic construct
  source 1..50: mol_type = other DNA
tcgcaaaaggtacgccaagggcgatatcgctggataatcagcggaattga

SEQ ID NO: 56608 - DNA, 50 bp, synthetic construct
  source 1..50: mol_type = other DNA
agaaaaccgcgataaagcgaatggcggcctttaaaactgccaacttatct

SEQ ID NO: 56609 - DNA, 50 bp, synthetic construct
  source 1..50: mol_type = other DNA
ggaaatacacttgtccaaaaatgctgcaatttattgtaacatgaatttta

SEQ ID NO: 56610 - DNA, 50 bp, synthetic construct
  source 1..50: mol_type = other DNA
tctttacgccccggaagtcaacgatatattcctcttcgtccacgtccagc

SEQ ID NO: 56611 - DNA, 50 bp, synthetic construct
  source 1..50: mol_type = other DNA
atcaactttctcccgatctttcagagctgaaaggagggctgaaacatgcc

SEQ ID NO: 56612 - DNA, 50 bp, synthetic construct
  source 1..50: mol_type = other DNA
aaaatacggtaaaggcgccggggacggcccgcttcttttagataaattca

SEQ ID NO: 56613 - DNA, 50 bp, synthetic construct
  source 1..50: mol_type = other DNA
cgtttcggtctgcggttttttactgcagagaagcgccgcatcgcgaaaga

SEQ ID NO: 56614 - DNA, 50 bp, synthetic construct
  source 1..50: mol_type = other DNA
gaagtcctgtgatctgggtgtgcaagcgatcagagtgatgtatagacacg

SEQ ID NO: 56615 - DNA, 50 bp, synthetic construct
  source 1..50: mol_type = other DNA
ccggatctgtttttatatagatgttaacccttatataaattcctaacctt

SEQ ID NO: 56616 - DNA, 50 bp, synthetic construct
  source 1..50: mol_type = other DNA
acaagtaatttataatatccgaatcggaaataatgcctgaaattgcttga

SEQ ID NO: 56617 - DNA, 50 bp, synthetic construct
  source 1..50: mol_type = other DNA
tttgtaaacaacaagccgctttaaaagcgaggcggtttgatgggtaacgt

SEQ ID NO: 56618 - DNA, 50 bp, synthetic construct
  source 1..50: mol_type = other DNA
gcgatgggcataaactccctgcgtcgggggccggagtgagcccatccaag

SEQ ID NO: 56619 - DNA, 50 bp, synthetic construct
  source 1..50: mol_type = other DNA
ctccagtgcagaaagcacctcaggcgcctggatttcggcctgcttaaaaa

SEQ ID NO: 56620 - DNA, 50 bp, synthetic construct
  source 1..50: mol_type = other DNA
tatcaagtcattttccctatatatacatataatttgaaaaggccagaaag

SEQ ID NO: 56621 - DNA, 50 bp, synthetic construct
  source 1..50: mol_type = other DNA
acctgaaggaggatgtaacccgtgtctatttgtgtactcttgctttagga

SEQ ID NO: 56622 - DNA, 50 bp, synthetic construct
  source 1..50: mol_type = other DNA
aatatagttatacataagataacgtgttcatacatttgtataaaaatatg

SEQ ID NO: 56623 - DNA, 50 bp, synthetic construct
  source 1..50: mol_type = other DNA
atttttcttacctttttcaatttttcattgtttcaaaagctacaaaaaca

SEQ ID NO: 56624 - DNA, 50 bp, synthetic construct
  source 1..50: mol_type = other DNA
gtgggaatatgttctattattatacttgccatacaagggcatatcttcgg

SEQ ID NO: 56625 - DNA, 50 bp, synthetic construct
  source 1..50: mol_type = other DNA
aaaggatacaattcgggaaaaggcaggcgtttcagggacacacatttttt

SEQ ID NO: 56626 - DNA, 50 bp, synthetic construct
  source 1..50: mol_type = other DNA
agtgggtctttttttattatttattaaaaaattacaaaaacgaatacagc

SEQ ID NO: 56627 - DNA, 50 bp, synthetic construct
  source 1..50: mol_type = other DNA
tcaaagtgcattaaattttataaatgtttgcacaatttaaattacttgct

SEQ ID NO: 56628 - DNA, 50 bp, synthetic construct
  source 1..50: mol_type = other DNA
gaacattatctcaaagtgcattaaatggaatggtggttgaagaagaattt

SEQ ID NO: 56629 - DNA, 50 bp, synthetic construct
  source 1..50: mol_type = other DNA
tacaccactaggtcaattgaatagaagatccaaaagccaatagtggtgtt

SEQ ID NO: 56630 - DNA, 50 bp, synthetic construct
  source 1..50: mol_type = other DNA
tgtggtggcttttatggcagaaagaaatggctcgacaaagagcattgaag

SEQ ID NO: 56631 - DNA, 50 bp, synthetic construct
  source 1..50: mol_type = other DNA
tgttactttcttttgctgttccaatatcatgagattaaaagaaagtacac

SEQ ID NO: 56632 - DNA, 50 bp, synthetic construct
  source 1..50: mol_type = other DNA
aggataaatcgacaaagaaaaatattttgaccggcttatcgatgggagca

SEQ ID NO: 56633 - DNA, 50 bp, synthetic construct
  source 1..50: mol_type = other DNA
ataaccattacgctgttaagtaccgaggtcattatggaaaagatagttac

SEQ ID NO: 56634 - DNA, 50 bp, synthetic construct
  source 1..50: mol_type = other DNA
tattttgggcaggataaataatctatatggctcccgggtatttcaaattc

SEQ ID NO: 56635 - DNA, 50 bp, synthetic construct
  source 1..50: mol_type = other DNA
gcatgcaggccttattgctgaggctaaaagacttgataaataaggctttt

SEQ ID NO: 56636 - DNA, 50 bp, synthetic construct
  source 1..50: mol_type = other DNA
tgccaaataaaatctgaattattttaattgaattcatatgggattattca

SEQ ID NO: 56637 - DNA, 50 bp, synthetic construct
  source 1..50: mol_type = other DNA
gcgcatcgggccttctctcctgctgttgctttccctgaggtcctctttgc

SEQ ID NO: 56638 - DNA, 50 bp, synthetic construct
  source 1..50: mol_type = other DNA
cctaattataaaagagcagcggtaattaatgcggctctggaccacttacc

SEQ ID NO: 56639 - DNA, 50 bp, synthetic construct
  source 1..50: mol_type = other DNA
aaaatgaacgagctgatcaaacagggttgtttgaggcagaaatttttttt

SEQ ID NO: 56640 - DNA, 50 bp, synthetic construct
  source 1..50: mol_type = other DNA
tttatagttttttaaatccataaaatctttcttttttctaaaaaaataaa

SEQ ID NO: 56641 - DNA, 50 bp, synthetic construct
  source 1..50: mol_type = other DNA
cctagaagctatctatgaaccagtttactgattagatgatagaaaggagg

SEQ ID NO: 56642 - DNA, 50 bp, synthetic construct
  source 1..50: mol_type = other DNA
agctgaaatgttggcatttttgtatgatgaaaaataggtacaaaatagcc

SEQ ID NO: 56643 - DNA, 50 bp, synthetic construct
  source 1..50: mol_type = other DNA
ctaagttattgttgttctaggagaattctgataagataacaataacgttc

SEQ ID NO: 56644 - DNA, 50 bp, synthetic construct
  source 1..50: mol_type = other DNA
gaatagtttttttaaaaaatcccaagatggcaaatttaaaaaatctattt

SEQ ID NO: 56645 - DNA, 50 bp, synthetic construct
  source 1..50: mol_type = other DNA
cggccgtatctccggtaatttcgtcagcgcggtggccagggagatcaccg

SEQ ID NO: 56646 - DNA, 50 bp, synthetic construct
  source 1..50: mol_type = other DNA
atacatgtaaattttctttaggcgtaatgatccagataatacaaatatat

SEQ ID NO: 56647 - DNA, 50 bp, synthetic construct
  source 1..50: mol_type = other DNA
agccgaagccggctttgcgccgagtcctcggcgtctggcaggaagagttt

SEQ ID NO: 56648 - DNA, 50 bp, synthetic construct
  source 1..50: mol_type = other DNA
tgctgtgttgcccaataagattctggagaaaaaacaagggcaaggaagag

SEQ ID NO: 56649 - DNA, 50 bp, synthetic construct
  source 1..50: mol_type = other DNA
gaatctatttttggcaatttttcaatcgacaagttgccaacagctagctg

SEQ ID NO: 56650 - DNA, 50 bp, synthetic construct
  source 1..50: mol_type = other DNA
atgctttagatattccagctaatagctatggataagaaaatactttgcat

SEQ ID NO: 56651 - DNA, 50 bp, synthetic construct
  source 1..50: mol_type = other DNA
ccagtcttgtatcaaaatgaacgtgtaaggagattgagatacatgggtga

SEQ ID NO: 56652 - DNA, 50 bp, synthetic construct
  source 1..50: mol_type = other DNA
ggctgagcgcgtcaccaacactgacgccagtgacggtgaagctggacgag

SEQ ID NO: 56653 - DNA, 50 bp, synthetic construct
  source 1..50: mol_type = other DNA
aagctctttgatgaagcccaggagaagaaacaggccgccgaaaatgtctt

SEQ ID NO: 56654 - DNA, 50 bp, synthetic construct
  source 1..50: mol_type = other DNA
agcaacgtttgcaaataatgcagttaaggtataacactaacaacgtagaa

SEQ ID NO: 56655 - DNA, 50 bp, synthetic construct
  source 1..50: mol_type = other DNA
gccttcaccgccacggccgcctcggttgaggcgacgatggcgaggcgcag

SEQ ID NO: 56656 - DNA, 50 bp, synthetic construct
  source 1..50: mol_type = other DNA
tcgaattccaggccgaacccgcccgcggaaacgcaacggctggtgctgga

SEQ ID NO: 56657 - DNA, 50 bp, synthetic construct
  source 1..50: mol_type = other DNA
atcgctcacatcctcacccagatcacttgctggatgctttgcagcgcaaa

SEQ ID NO: 56658 - DNA, 50 bp, synthetic construct
  source 1..50: mol_type = other DNA
cgatcctcgggccggtctcggtcaccttaacctcaccgtccccgggattt

SEQ ID NO: 56659 - DNA, 50 bp, synthetic construct
  source 1..50: mol_type = other DNA
ccgcttcagcatctgaatgccgacctggtgagacagggaccctgatatct

SEQ ID NO: 56660 - DNA, 50 bp, synthetic construct
  source 1..50: mol_type = other DNA
ctaatgctgtcaatattcccgccaagccgcggggctgatgacaaccgagt

SEQ ID NO: 56661 - DNA, 50 bp, synthetic construct
  source 1..50: mol_type = other DNA
gaagtgcagacggtgaccatactggcctctatgcctaccgtcaaacgcgc

SEQ ID NO: 56662 - DNA, 50 bp, synthetic construct
  source 1..50: mol_type = other DNA
gcagattcatggcaaatccggtttcggatttggattggattggactctgg

SEQ ID NO: 56663 - DNA, 50 bp, synthetic construct
  source 1..50: mol_type = other DNA
gaccgtcaccacgttcacgcccgaggtgctgcgtgagaccgctgacggga

SEQ ID NO: 56664 - DNA, 50 bp, synthetic construct
  source 1..50: mol_type = other DNA
cggcgatcgtcgaggacgccggcaaccgcactgatcgaggaagcgatccg

SEQ ID NO: 56665 - DNA, 50 bp, synthetic construct
  source 1..50: mol_type = other DNA
tttattttcatcaataatttttatttggcggaatttttgatgccaaggaa

SEQ ID NO: 56666 - DNA, 50 bp, synthetic construct
  source 1..50: mol_type = other DNA
gtccaatattccttcctgccgttaaataaataaataaataaataatattt

SEQ ID NO: 56667 - DNA, 50 bp, synthetic construct
  source 1..50: mol_type = other DNA
attactatatatcactctaaatgatgcaatacaatatgatatagcattaa

SEQ ID NO: 56668 - DNA, 50 bp, synthetic construct
  source 1..50: mol_type = other DNA
tcagaaaatagtgatggcatatttgcaaaaataagcccattattccttga

SEQ ID NO: 56669 - DNA, 50 bp, synthetic construct
  source 1..50: mol_type = other DNA
gatggaacagaaataaatggataaaattggaagttttttgcatttatgat

SEQ ID NO: 56670 - DNA, 50 bp, synthetic construct
  source 1..50: mol_type = other DNA
aaaagtcataattattttccagtatttaaaagataataattataccgttt

SEQ ID NO: 56671 - DNA, 50 bp, synthetic construct
  source 1..50: mol_type = other DNA
gcccaatatttctcactccttatcttgataaggctggtgacggtttggta

SEQ ID NO: 56672 - DNA, 50 bp, synthetic construct
  source 1..50: mol_type = other DNA
ctatcttcgtgattttcgccatttgatgttgctgaaatacaggctgaaag

SEQ ID NO: 56673 - DNA, 50 bp, synthetic construct
  source 1..50: mol_type = other DNA
atgattgtcaaggaggtgcgccaaatttagagacacagactaacaatata

SEQ ID NO: 56674 - DNA, 50 bp, synthetic construct
  source 1..50: mol_type = other DNA
ataatcacttcctttctgatacaataaggttcaaaaaagggggtttagtt

SEQ ID NO: 56675 - DNA, 50 bp, synthetic construct
  source 1..50: mol_type = other DNA
atttctacggaaaacgaattaggtactttctccccgtttttgtcagagat

SEQ ID NO: 56676 - DNA, 50 bp, synthetic construct
  source 1..50: mol_type = other DNA
tttgttatttgcgtgttataataaatccattcaaacaggctgaatacgcc

SEQ ID NO: 56677 - DNA, 50 bp, synthetic construct
  source 1..50: mol_type = other DNA
acaaaaaaataaattgaaaaggagttataaacttcaaagagttcttttac

SEQ ID NO: 56678 - DNA, 50 bp, synthetic construct
  source 1..50: mol_type = other DNA
caatgcgtgccggtgatggctttcgcacagcgcaagacgctgccgcaggt

SEQ ID NO: 56679 - DNA, 50 bp, synthetic construct
  source 1..50: mol_type = other DNA
cccggtggtcggtgcgggctgcctcgaatgccttcatacccaaggccgtc

SEQ ID NO: 56680 - DNA, 50 bp, synthetic construct
  source 1..50: mol_type = other DNA
cttgctgagcagcctggcgggcaaggtggttcgccagtgcatacagcacc

SEQ ID NO: 56681 - DNA, 50 bp, synthetic construct
  source 1..50: mol_type = other DNA
ggcagctcgtccagaaacagcaccccggggctgtttctgcatcagaggca

SEQ ID NO: 56682 - DNA, 50 bp, synthetic construct
  source 1..50: mol_type = other DNA
gctataatattgatatgaacttttgatgatgttattgtgcacattatatc

SEQ ID NO: 56683 - DNA, 50 bp, synthetic construct
  source 1..50: mol_type = other DNA
aaaagagaggctgaacgctttaaaaggttaaagctttcactttggtagaa

SEQ ID NO: 56684 - DNA, 50 bp, synthetic construct
  source 1..50: mol_type = other DNA
tggtcatgcggtagaaatttcctgccaatcttttttgtcacgcatgactt

SEQ ID NO: 56685 - DNA, 50 bp, synthetic construct
  source 1..50: mol_type = other DNA
aatctggcgatcctcaatcggttcgcgttgctcttggagatgtcgagctg

SEQ ID NO: 56686 - DNA, 50 bp, synthetic construct
  source 1..50: mol_type = other DNA
gaggttggtgatgtaaatgaggtatattccacagcatgatatggaaaagt

SEQ ID NO: 56687 - DNA, 50 bp, synthetic construct
  source 1..50: mol_type = other DNA
actaggtttcacctcgctacggtgaggttattacaggtgtaaacactcgt

SEQ ID NO: 56688 - DNA, 50 bp, synthetic construct
  source 1..50: mol_type = other DNA
cctttattttcaatttcaaagtcgcggggatctgcatgtgctcggaaagg

SEQ ID NO: 56689 - DNA, 50 bp, synthetic construct
  source 1..50: mol_type = other DNA
tgtaatattttttgccaccgatgttccaatcttctatagaaaataaatca

SEQ ID NO: 56690 - DNA, 50 bp, synthetic construct
  source 1..50: mol_type = other DNA
tgtctgctttataggaccctgaatcccctcatccgcataaatatcaacca

SEQ ID NO: 56691 - DNA, 50 bp, synthetic construct
  source 1..50: mol_type = other DNA
tataggcccaagcttgcgtataaaatttcatacatcacacgccccctata

SEQ ID NO: 56692 - DNA, 50 bp, synthetic construct
  source 1..50: mol_type = other DNA
ataccgaatagactatcatttagtcaagcaattgataatctccattgatt

SEQ ID NO: 56693 - DNA, 50 bp, synthetic construct
  source 1..50: mol_type = other DNA
tctgagtttgagatatgactgtttgccttgagtccccactcaaaggcttt

SEQ ID NO: 56694 - DNA, 50 bp, synthetic construct
  source 1..50: mol_type = other DNA
cttatattcatttttcctcctacaagaaagtgtgtctaaatgaagttttg

SEQ ID NO: 56695 - DNA, 50 bp, synthetic construct
  source 1..50: mol_type = other DNA
gtcctgcacgctggtcgcgccccacacggggcgtgcaacgcaccttagtg

SEQ ID NO: 56696 - DNA, 50 bp, synthetic construct
  source 1..50: mol_type = other DNA
ctccttttttgataaaatagagtataataactatcttgtcagatgtgact

SEQ ID NO: 56697 - DNA, 50 bp, synthetic construct
  source 1..50: mol_type = other DNA
atacagtttatacaggaatcggtcttcggcgattgatgtgaaaaattttg

SEQ ID NO: 56698 - DNA, 50 bp, synthetic construct
  source 1..50: mol_type = other DNA
ttgtatcatctatatttacctattataaacaaacaaaaagttaggatttc

SEQ ID NO: 56699 - DNA, 50 bp, synthetic construct
  source 1..50: mol_type = other DNA
cagatcatggttatttagctgtagagcaaccggctcataaccggtcggtc

SEQ ID NO: 56700 - DNA, 50 bp, synthetic construct
  source 1..50: mol_type = other DNA
tttgcatattacgctcctttcttgcaagggatgggcttgtaaaaatataa

SEQ ID NO: 56701 - DNA, 50 bp, synthetic construct
  source 1..50: mol_type = other DNA
actctaaaaggcaggaatatcaagcgataagtattcgggatgcttagagc

SEQ ID NO: 56702 - DNA, 50 bp, synthetic construct
  source 1..50: mol_type = other DNA
tatgtgtggaagaagtatgtatagaaatataaaggagtgatatactatgg

SEQ ID NO: 56703 - DNA, 50 bp, synthetic construct
  source 1..50: mol_type = other DNA
tctttcctgtaccatcctgtttcctcactgacataagccagctctggagc

SEQ ID NO: 56704 - DNA, 50 bp, synthetic construct
  source 1..50: mol_type = other DNA
cggggacctgatagaacccggctttacgggcaccttcctccgtcaggcct

SEQ ID NO: 56705 - DNA, 50 bp, synthetic construct
  source 1..50: mol_type = other DNA
tgaatgtgggcttattggtggcaaatactttaccagcacctaaactttca

SEQ ID NO: 56706 - DNA, 50 bp, synthetic construct
  source 1..50: mol_type = other DNA
aagaacggttatcatttaatatagaattatattgacaagtaaggctgttt

SEQ ID NO: 56707 - DNA, 50 bp, synthetic construct
  source 1..50: mol_type = other DNA
gtgccgcacgtatcatgtcaataaatttgctgaaatgccggatatgtaca

SEQ ID NO: 56708 - DNA, 50 bp, synthetic construct
  source 1..50: mol_type = other DNA
atattatttttttatagctttatgtgtataaaaatgttacaaaatagatt

SEQ ID NO: 56709 - DNA, 50 bp, synthetic construct
  source 1..50: mol_type = other DNA
ttatgggacaaggggataaaaatggtgcagacttgtctattatcccggaa

SEQ ID NO: 56710 - DNA, 50 bp, synthetic construct
  source 1..50: mol_type = other DNA
ctaccattacacaattccgcatcatcacaggcaaaaacttcatcgtaatt

SEQ ID NO: 56711 - DNA, 50 bp, synthetic construct
  source 1..50: mol_type = other DNA
gctgttatcatggggcgttcccgaatggttggtttgtccatgataagcag

SEQ ID NO: 56712 - DNA, 50 bp, synthetic construct
  source 1..50: mol_type = other DNA
gcttttgttttattaacaattcccatgggaattctttcttaaccggaaga

SEQ ID NO: 56713 - DNA, 50 bp, synthetic construct
  source 1..50: mol_type = other DNA
tggcgccaaccgcgctgcgtacagccggctgtgcaagcgggttgttttca

SEQ ID NO: 56714 - DNA, 50 bp, synthetic construct
  source 1..50: mol_type = other DNA
gtgagcgcggcgatctcctccgccagggcgcgcggccgcatagcgccgca

SEQ ID NO: 56715 - DNA, 50 bp, synthetic construct
  source 1..50: mol_type = other DNA
gcggtaaccgtcatcccgcccaccatggtgatgtggccgccgggactggc

SEQ ID NO: 56716 - DNA, 50 bp, synthetic construct
  source 1..50: mol_type = other DNA
ggcatgagatgcttgaataagaatcaagatgtattgtactcttacatgcg

SEQ ID NO: 56717 - DNA, 50 bp, synthetic construct
  source 1..50: mol_type = other DNA
atgacctccaaacaaaaaaggcccgcgggctatgccttttcggatggctc

SEQ ID NO: 56718 - DNA, 50 bp, synthetic construct
  source 1..50: mol_type = other DNA
gtacataaagatgtttcagaaagattcatttaataaagtgtgttcgctag

SEQ ID NO: 56719 - DNA, 50 bp, synthetic construct
  source 1..50: mol_type = other DNA
tttaggagtacgtatatatccctacgtcttagtgtatccgtacttttcgc

SEQ ID NO: 56720 - DNA, 50 bp, synthetic construct
  source 1..50: mol_type = other DNA
atctcaacccaaaacggggagaatgttttcaacgagaatagccgaaagac

SEQ ID NO: 56721 - DNA, 50 bp, synthetic construct
  source 1..50: mol_type = other DNA
caaatgggaaagaataaaattttattttcaatttgatttcctccactttt

SEQ ID NO: 56722 - DNA, 50 bp, synthetic construct
  source 1..50: mol_type = other DNA
atacgcccgcgtctcgaccgaccatgaccgacccgaggatgtctgcgtcc

SEQ ID NO: 56723 - DNA, 50 bp, synthetic construct
  source 1..50: mol_type = other DNA
tggggacaggaccgtctgataggcgcgaaaagcagaccaaagccatccgg

SEQ ID NO: 56724 - DNA, 50 bp, synthetic construct
  source 1..50: mol_type = other DNA
gtgggcttatgctataataatctttgatagatcttatagcaaacgctaag

SEQ ID NO: 56725 - DNA, 50 bp, synthetic construct
  source 1..50: mol_type = other DNA
cccatatggcagcggaaaaccgctgcagcggggttcgcttatgttctgaa

SEQ ID NO: 56726 - DNA, 50 bp, synthetic construct
  source 1..50: mol_type = other DNA
tctctaaattacctagtaaataagcccttatttttcttcttttttcctta

SEQ ID NO: 56727 - DNA, 50 bp, synthetic construct
  source 1..50: mol_type = other DNA
ctttctgactcataaaactgttaaatttattataccattgaaagtcgcag

SEQ ID NO: 56728 - DNA, 50 bp, synthetic construct
  source 1..50: mol_type = other DNA
aaatgcctctcggatagcgttctggtcaaaacctgtgggcatcgctgttt

SEQ ID NO: 56729 - DNA, 50 bp, synthetic construct
  source 1..50: mol_type = other DNA
actgccggagtctctcattggtgtccatgggaatgcgggtcatggggttc

SEQ ID NO: 56730 - DNA, 50 bp, synthetic construct
  source 1..50: mol_type = other DNA
agtgcccgctgtctggaaatcctgcacgagatcgtcaccgccgaagcacg

SEQ ID NO: 56731 - DNA, 50 bp, synthetic construct
  source 1..50: mol_type = other DNA
ttaaaagttataaatatttatttttaacaatatcttttttaggcttatct

SEQ ID NO: 56732 - DNA, 50 bp, synthetic construct
  source 1..50: mol_type = other DNA
atttgcgcgcgcgtaaaagtgggaactcatgaagctaccaaagcgctagc

SEQ ID NO: 56733 - DNA, 50 bp, synthetic construct
  source 1..50: mol_type = other DNA
atagaacccgccatttggcgggttttaacaatctgaaataccggtgctat

SEQ ID NO: 56734 - DNA, 50 bp, synthetic construct
  source 1..50: mol_type = other DNA
tgctattttggcaccccggaccctgcgggttctgggtcatgatgagatag

SEQ ID NO: 56735 - DNA, 50 bp, synthetic construct
  source 1..50: mol_type = other DNA
ccgggtacactttgacaagcctgcccacagcattttcaatcacatcccgg

SEQ ID NO: 56736 - DNA, 50 bp, synthetic construct
  source 1..50: mol_type = other DNA
tagcaagcaacgatgatgtggcacgagtgatacaaaaagttgcatttcca

SEQ ID NO: 56737 - DNA, 50 bp, synthetic construct
  source 1..50: mol_type = other DNA
ttgtgttcatagcaaaaaagtggtataccagatttcgcagaaagagacaa

SEQ ID NO: 56738 - DNA, 50 bp, synthetic construct
  source 1..50: mol_type = other DNA
tatttctattttagcgcagatcagaacacgttgtcctgcgtatagaacgc

SEQ ID NO: 56739 - DNA, 50 bp, synthetic construct
  source 1..50: mol_type = other DNA
aaacaaacaattacctccacgtgcttgcacttggcgtcgattgggtgttg

SEQ ID NO: 56740 - DNA, 50 bp, synthetic construct
  source 1..50: mol_type = other DNA
ttgattttttgccactcctccgccacgctcaaggtatggcaaaaagaaaa

SEQ ID NO: 56741 - DNA, 50 bp, synthetic construct
  source 1..50: mol_type = other DNA
agatttcttctgacaagggccgctttttatgcctaaaacagaagaaaagc

SEQ ID NO: 56742 - DNA, 50 bp, synthetic construct
  source 1..50: mol_type = other DNA
ttttcgcaaaccaacaatactacatatgtagtttatttagtcgctgaatt

SEQ ID NO: 56743 - DNA, 50 bp, synthetic construct
  source 1..50: mol_type = other DNA
aatgggtacagaaaaagacttgtaagtccaagctttttcgtgagctgggg

SEQ ID NO: 56744 - DNA, 50 bp, synthetic construct
  source 1..50: mol_type = other DNA
gggtgttgtttttgggtagtgttgtacaaaaaagaagaaccccagcaagg

SEQ ID NO: 56745 - DNA, 50 bp, synthetic construct
  source 1..50: mol_type = other DNA
caaactataaatgtattctgcctgcttagttacaactgctgccttctttt

SEQ ID NO: 56746 - DNA, 50 bp, synthetic construct
  source 1..50: mol_type = other DNA
tcaagtcaattactgataaatctcgcattctgaatctctgtttcactgat

SEQ ID NO: 56747 - DNA, 50 bp, synthetic construct
  source 1..50: mol_type = other DNA
ttatcacagcgcataataatagtaaaggaggtaattatgttcttagaaat

SEQ ID NO: 56748 - DNA, 50 bp, synthetic construct
  source 1..50: mol_type = other DNA
ggttaaaatgcagcggcgcaatgcgccgattgaggatcgtcagattacgg

SEQ ID NO: 56749 - DNA, 50 bp, synthetic construct
  source 1..50: mol_type = other DNA
tgctgattgttcaatcaatgataaccttttggttgatactgctattgtac

SEQ ID NO: 56750 - DNA, 50 bp, synthetic construct
  source 1..50: mol_type = other DNA
caatttagcggtttcaagggtataatcccacccctgaaaatctttaccac

SEQ ID NO: 56751 - DNA, 50 bp, synthetic construct
  source 1..50: mol_type = other DNA
agccgatctttcgcctggccgaccgttgtcggcaacggtaatggtcggct

SEQ ID NO: 56752 - DNA, 50 bp, synthetic construct
  source 1..50: mol_type = other DNA
tataatatttttctctttctgccatctgacataagaagaaacagctggta

SEQ ID NO: 56753 - DNA, 50 bp, synthetic construct
  source 1..50: mol_type = other DNA
tgattctttaaataactcaggagtatcaccgagccagtttattacaaggc

SEQ ID NO: 56754 - DNA, 50 bp, synthetic construct
  source 1..50: mol_type = other DNA
aaagcttcatgggacggataaccatatggacggccagagcagccagcttg

SEQ ID NO: 56755 - DNA, 50 bp, synthetic construct
  source 1..50: mol_type = other DNA
tccttcccttatctgaatctccaagcttgcatccaaagatgggcagaggt

SEQ ID NO: 56756 - DNA, 50 bp, synthetic construct
  source 1..50: mol_type = other DNA
gcaggggcagagggactcaaacccccaatgccgagatcctgcagctctcc

SEQ ID NO: 56757 - DNA, 50 bp, synthetic construct
  source 1..50: mol_type = other DNA
ttgagtctttcaatatatgtaataatatacaaatatcgtgaaacacgcaa

SEQ ID NO: 56758 - DNA, 50 bp, synthetic construct
  source 1..50: mol_type = other DNA
attggttgtcatccattttcattatacactgacaaaggaggtgaaacacc

SEQ ID NO: 56759 - DNA, 50 bp, synthetic construct
  source 1..50: mol_type = other DNA
atcccgcaattctgcgaggttttttgaaaatccggtcaggcaggcagaat

SEQ ID NO: 56760 - DNA, 50 bp, synthetic construct
  source 1..50: mol_type = other DNA
tagggcgggtcggttaccaccagattggctgtggtacaatgagtgtgcca

SEQ ID NO: 56761 - DNA, 50 bp, synthetic construct
  source 1..50: mol_type = other DNA
tcaacttaaaatgggggtgtttttatcaaaacacctcctaagacaataat

SEQ ID NO: 56762 - DNA, 50 bp, synthetic construct
  source 1..50: mol_type = other DNA
aggatgcaaatagataattgtatgaccaataaatttgaacgagcaatgaa

SEQ ID NO: 56763 - DNA, 50 bp, synthetic construct
  source 1..50: mol_type = other DNA
ttcaattatcgctgtttcaatctcatgtgacactaacgaagggaggtgaa

SEQ ID NO: 56764 - DNA, 50 bp, synthetic construct
  source 1..50: mol_type = other DNA
gcttaaactgcggtcgactctgacaatcctgtcaaacaggcagaatatct

SEQ ID NO: 56765 - DNA, 50 bp, synthetic construct
  source 1..50: mol_type = other DNA
atattatcaacggatttcgggcataattgcccgacgccggtggaatatcc

SEQ ID NO: 56766 - DNA, 50 bp, synthetic construct
  source 1..50: mol_type = other DNA
gtttgagtgagatataaagtacagttatacacttgataattgtatcaaac

SEQ ID NO: 56767 - DNA, 50 bp, synthetic construct
  source 1..50: mol_type = other DNA
agtgtgagcaaaggctcggcagtgatgattcagatgggcttgctccactc

SEQ ID NO: 56768 - DNA, 50 bp, synthetic construct
  source 1..50: mol_type = other DNA
caagaagaagcagtctgctgaccagctgccatgcagacggcaaagaacct

SEQ ID NO: 56769 - DNA, 50 bp, synthetic construct
  source 1..50: mol_type = other DNA
gaacatcctcatcaccgaaaaggatggcttttagagtgatatatagtgtc

SEQ ID NO: 56770 - DNA, 50 bp, synthetic construct
  source 1..50: mol_type = other DNA
ataaaaataaattgacatgaaatttaaattaaattactatgctttttatg

SEQ ID NO: 56771 - DNA, 50 bp, synthetic construct
  source 1..50: mol_type = other DNA
atcctttacaggataagcattgcatcagttctgcctattctgtaagactt

SEQ ID NO: 56772 - DNA, 50 bp, synthetic construct
  source 1..50: mol_type = other DNA
taataaaaattatttgggaaattttttgttttatcatataatttttatgt

SEQ ID NO: 56773 - DNA, 50 bp, synthetic construct
  source 1..50: mol_type = other DNA
tcattaaaacttctttatgagtatccgtcttgtgaaatcagtttttgaga

SEQ ID NO: 56774 - DNA, 50 bp, synthetic construct
  source 1..50: mol_type = other DNA
cttatcatcctttctctgaatataaatgccttctgaccggacttgttaac

SEQ ID NO: 56775 - DNA, 50 bp, synthetic construct
  source 1..50: mol_type = other DNA
aagcctgctgcctgtcggaagcgcatccgtggaaacacggcagtaggctg

SEQ ID NO: 56776 - DNA, 50 bp, synthetic construct
  source 1..50: mol_type = other DNA
atgtggatctgtccacatcctcttttttatggagaatgaacgcaccctgc

SEQ ID NO: 56777 - DNA, 50 bp, synthetic construct
  source 1..50: mol_type = other DNA
ttgtctgcccctttctatttcgtgccagcgacacgacaagcaggcacgcc

SEQ ID NO: 56778 - DNA, 50 bp, synthetic construct
  source 1..50: mol_type = other DNA
gatagtgttgcagccatatctatcatggtgccgcaaaatgccacatcatc

SEQ ID NO: 56779 - DNA, 50 bp, synthetic construct
  source 1..50: mol_type = other DNA
gttttatgataaaatgagacttgcggtcaatgatagcaggacaataattt

SEQ ID NO: 56780 - DNA, 50 bp, synthetic construct
  source 1..50: mol_type = other DNA
gaaaccttcgggtagcggcatattgcaagttgattcttccggaagcaatc

SEQ ID NO: 56781 - DNA, 50 bp, synthetic construct
  source 1..50: mol_type = other DNA
atttccttcagtttcttccgtaaaaactgacagaaaaagaagaaggggga

SEQ ID NO: 56782 - DNA, 50 bp, synthetic construct
  source 1..50: mol_type = other DNA
tccgtaaatcatagtatgaaaaaatgctttttgcggcgctgttttacggc

SEQ ID NO: 56783 - DNA, 50 bp, synthetic construct
  source 1..50: mol_type = other DNA
gccataagctggaaccggaaaagggccctgaaaccgttgataatactggg

SEQ ID NO: 56784 - DNA, 50 bp, synthetic construct
  source 1..50: mol_type = other DNA
ttttatatattaggtgtagacttcttttgtacttcttgttatataaaaaa

SEQ ID NO: 56785 - DNA, 50 bp, synthetic construct
  source 1..50: mol_type = other DNA
cgttatttttttgccctaacattgtacaatttcgcggggtgtttttatta

SEQ ID NO: 56786 - DNA, 50 bp, synthetic construct
  source 1..50: mol_type = other DNA
ttgaaatctatgatactcttgaacctcactatgatgatttttcattttta

SEQ ID NO: 56787 - DNA, 50 bp, synthetic construct
  source 1..50: mol_type = other DNA
ggtcgaggctctttcattcggcgtgctggccgaggatgtgatgcacgacc

SEQ ID NO: 56788 - DNA, 50 bp, synthetic construct
  source 1..50: mol_type = other DNA
tatatttcatgtgttcgatcatcggaagacattcattgattataagatta

SEQ ID NO: 56789 - DNA, 50 bp, synthetic construct
  source 1..50: mol_type = other DNA
cctcttttaattcattgataatcgattaattccaaatgtaaaaagagata

SEQ ID NO: 56790 - DNA, 50 bp, synthetic construct
  source 1..50: mol_type = other DNA
cacgctggcggtcgagctcctcaagctccttgagttcttccgcgcgctcc

SEQ ID NO: 56791 - DNA, 50 bp, synthetic construct
  source 1..50: mol_type = other DNA
tcaagtggaaaatataaataattttaaaactctcgctcttttccatctca

SEQ ID NO: 56792 - DNA, 50 bp, synthetic construct
  source 1..50: mol_type = other DNA
tcttaaaacatgaagattatgagttaatttgaaattttcattagaatccc

SEQ ID NO: 56793 - DNA, 50 bp, synthetic construct
  source 1..50: mol_type = other DNA
atcaaaattctaaaaaacacttgcaaatcagagtagccgcttattgtcga

SEQ ID NO: 56794 - DNA, 50 bp, synthetic construct
  source 1..50: mol_type = other DNA
gcccatgctgatgggtgcggcgcacaagtcccgcctcgcgcaccatggcg

SEQ ID NO: 56795 - DNA, 50 bp, synthetic construct
  source 1..50: mol_type = other DNA
catgaatcaagttctcgaccacatcagggttgctgattacttgactaata

SEQ ID NO: 56796 - DNA, 50 bp, synthetic construct
  source 1..50: mol_type = other DNA
actgtgaccaggaagttgcagtcttttccaagcaatttagtcatcccagt

SEQ ID NO: 56797 - DNA, 50 bp, synthetic construct
  source 1..50: mol_type = other DNA
ctctggcatggatgtcgcgccccacacggggcgtgcaacgcatcttagtg

SEQ ID NO: 56798 - DNA, 50 bp, synthetic construct
  source 1..50: mol_type = other DNA
ggcccctgctgcagcatggcttaaattttcaatatgctccagcacaaagc

SEQ ID NO: 56799 - DNA, 50 bp, synthetic construct
  source 1..50: mol_type = other DNA
acatcttaaaacatgaagattatgagtataattttcatctacgaagccac

SEQ ID NO: 56800 - DNA, 50 bp, synthetic construct
  source 1..50: mol_type = other DNA
atgaagaaattcaaaacatctgtgatcagagtagccgcttattgtcgagt

SEQ ID NO: 56801 - DNA, 50 bp, synthetic construct
  source 1..50: mol_type = other DNA
agaaaatttatataacttcgataatcatatcagattgatatgacttctcc

SEQ ID NO: 56802 - DNA, 50 bp, synthetic construct
  source 1..50: mol_type = other DNA
cttctttgagttgaaatatgacctcatcatccaaacgaaactcaagcgct

SEQ ID NO: 56803 - DNA, 50 bp, synthetic construct
  source 1..50: mol_type = other DNA
ctttccactcccatattcccgtactatccgcgcatatagggaagcgaaac

SEQ ID NO: 56804 - DNA, 50 bp, synthetic construct
  source 1..50: mol_type = other DNA
gagtttttcagttgagatataagtctgaaatgccttcatctgcatagatg

SEQ ID NO: 56805 - DNA, 50 bp, synthetic construct
  source 1..50: mol_type = other DNA
aaaaaatcccgaatattataataatttttttatgctcagagccgctttat

SEQ ID NO: 56806 - DNA, 50 bp, synthetic construct
  source 1..50: mol_type = other DNA
agttataaactctctacatattcaattgataagctagatttaattgaaaa

SEQ ID NO: 56807 - DNA, 50 bp, synthetic construct
  source 1..50: mol_type = other DNA
agttttctttgttttaaattttttattaaaacctgaaaaagactgcaact

SEQ ID NO: 56808 - DNA, 50 bp, synthetic construct
  source 1..50: mol_type = other DNA
agattaaccgaaaatttagaagataactcataatcttcatgttttaagat

SEQ ID NO: 56809 - DNA, 50 bp, synthetic construct
  source 1..50: mol_type = other DNA
gcatcttcacggtgtttcggcggggccgcgcccgaagttcgagaagatgg

SEQ ID NO: 56810 - DNA, 50 bp, synthetic construct
  source 1..50: mol_type = other DNA
ttctctgctataatatagggtgcttaagcaaaaatgagcagagaaaagaa

SEQ ID NO: 56811 - DNA, 50 bp, synthetic construct
  source 1..50: mol_type = other DNA
caggatatgccagagtttcgaccgactacgaacgtgtccaaggcattgtg

SEQ ID NO: 56812 - DNA, 50 bp, synthetic construct
  source 1..50: mol_type = other DNA
ttggactacagttatcagcgtttcttgaaacgatgggaacaagtcgaaaa

SEQ ID NO: 56813 - DNA, 50 bp, synthetic construct
  source 1..50: mol_type = other DNA
ttcttttaatttttctagtattaaatattatattacttgcattattagaa

SEQ ID NO: 56814 - DNA, 50 bp, synthetic construct
  source 1..50: mol_type = other DNA
agtagtcaatgatccaacaaataaatttggcctttagagtgatatatagt

SEQ ID NO: 56815 - DNA, 50 bp, synthetic construct
  source 1..50: mol_type = other DNA
ctatgtcggcaactctgcaagcatttattccagcaaagaaaacgatacaa

SEQ ID NO: 56816 - DNA, 50 bp, synthetic construct
  source 1..50: mol_type = other DNA
aatataatagtaatcagcccgcggttcaacgggcacttatctataaggaa

SEQ ID NO: 56817 - DNA, 50 bp, synthetic construct
  source 1..50: mol_type = other DNA
agctcgtacgtattcgaaacggatgtgcccgattcgtatcaagtatggaa

SEQ ID NO: 56818 - DNA, 50 bp, synthetic construct
  source 1..50: mol_type = other DNA
atctcatccgctcctttccatgcctatcttcggaatatctccttgacgat

SEQ ID NO: 56819 - DNA, 50 bp, synthetic construct
  source 1..50: mol_type = other DNA
acaaaaaacccttttgacgattctatagcatcttcatggcgtattttcca

SEQ ID NO: 56820 - DNA, 50 bp, synthetic construct
  source 1..50: mol_type = other DNA
aaatgataatgaacgtttctattctaaaaaagaaaaaaatcatatcagat

SEQ ID NO: 56821 - DNA, 50 bp, synthetic construct
  source 1..50: mol_type = other DNA
catctatgcggatgagggcatttcaggaactgtttcatcatcattagata

SEQ ID NO: 56822 - DNA, 50 bp, synthetic construct
  source 1..50: mol_type = other DNA
ggtataataagataatcttttgataaacatgaaaataatcttcctctagc

SEQ ID NO: 56823 - DNA, 50 bp, synthetic construct
  source 1..50: mol_type = other DNA
cattcccgctcatatacctcctggctattggagggatacaacatggaaga

SEQ ID NO: 56824 - DNA, 50 bp, synthetic construct
  source 1..50: mol_type = other DNA
aaaatcaacacaaatagactttcattgtatatttcttttatttccttttt

SEQ ID NO: 56825 - DNA, 50 bp, synthetic construct
  source 1..50: mol_type = other DNA
gttccctacatcaaacaacatgatgaatcaatgcttttgatgtatgggtt

SEQ ID NO: 56826 - DNA, 50 bp, synthetic construct
  source 1..50: mol_type = other DNA
atcagataaaaagaattatcgctaaaaaggagctgatttttttatgctta

SEQ ID NO: 56827 - DNA, 50 bp, synthetic construct
  source 1..50: mol_type = other DNA
aggttaattattaccgtgaatacatctataccttaaagaaggacttagaa

SEQ ID NO: 56828 - DNA, 50 bp, synthetic construct
  source 1..50: mol_type = other DNA
ttaaattctctggaggacgcataatgttactggtcctacaacgacgacta

SEQ ID NO: 56829 - DNA, 50 bp, synthetic construct
  source 1..50: mol_type = other DNA
aacctccatattttgataaattggcataaaacctacaaaatagggaggat

SEQ ID NO: 56830 - DNA, 50 bp, synthetic construct
  source 1..50: mol_type = other DNA
ggtatctaaactatcataaataaaatattataagagatattttatttctt

SEQ ID NO: 56831 - DNA, 50 bp, synthetic construct
  source 1..50: mol_type = other DNA
gggagaggagttgattgatgttgaaatcaaggatagtaaaactcttatat

SEQ ID NO: 56832 - DNA, 50 bp, synthetic construct
  source 1..50: mol_type = other DNA
tcaggacgtatccggtgtccaagatggctttcggaacggatccgacggga

SEQ ID NO: 56833 - DNA, 50 bp, synthetic construct
  source 1..50: mol_type = other DNA
atagcaagaaagtatatgactttaataaaagatatcgagattcaggtgga

SEQ ID NO: 56834 - DNA, 50 bp, synthetic construct
  source 1..50: mol_type = other DNA
ataaatggcgccattgcgccgttcttccgacgcgcggaacgccattttat

SEQ ID NO: 56835 - DNA, 50 bp, synthetic construct
  source 1..50: mol_type = other DNA
ttcaagaacaatttatttggatatttatatcctaaaaaatacaagtagag

SEQ ID NO: 56836 - DNA, 50 bp, synthetic construct
  source 1..50: mol_type = other DNA
tacgatcaggaaaacagagaaatttaaatctgtttattttttgcgttcaa

SEQ ID NO: 56837 - DNA, 50 bp, synthetic construct
  source 1..50: mol_type = other DNA
gatattgggcagatatttgttaagaggataacaactatatgcacaatctc

SEQ ID NO: 56838 - DNA, 50 bp, synthetic construct
  source 1..50: mol_type = other DNA
ataaataacggcagtttttgacataaatgcagacttttgaagttctgctt

SEQ ID NO: 56839 - DNA, 50 bp, synthetic construct
  source 1..50: mol_type = other DNA
cttttgtacggctgcggtttagaaaattctattactacgaattaggaaat

SEQ ID NO: 56840 - DNA, 50 bp, synthetic construct
  source 1..50: mol_type = other DNA
agaaacgcattataataaggaagaaaaaagcccctaaatacgcgggattc

SEQ ID NO: 56841 - DNA, 50 bp, synthetic construct
  source 1..50: mol_type = other DNA
aataatactgcctctcaggctcatattatagcaaagaaggccagaaaatg

SEQ ID NO: 56842 - DNA, 50 bp, synthetic construct
  source 1..50: mol_type = other DNA
tattttcctaagtttcatgcgaattcttccgcagtaaatatactctccag

SEQ ID NO: 56843 - DNA, 50 bp, synthetic construct
  source 1..50: mol_type = other DNA
acttggattttacaaggattagtttaatatacaataaataaaatgcaaaa

SEQ ID NO: 56844 - DNA, 50 bp, synthetic construct
  source 1..50: mol_type = other DNA
atgataaattataatctactcctaattgaaggacgacctgcatttaagaa

SEQ ID NO: 56845 - DNA, 50 bp, synthetic construct
  source 1..50: mol_type = other DNA
aatgttcttttgctttccgtagaatcaggcaaaatttgcaaaagaaaaac

SEQ ID NO: 56846 - DNA, 50 bp, synthetic construct
  source 1..50: mol_type = other DNA
gccaaaaacattgtgctctcaaaagtttttatgccttcaaagtttttgga

SEQ ID NO: 56847 - DNA, 50 bp, synthetic construct
  source 1..50: mol_type = other DNA
aatttgttactatacctatgatagatattttatcataattatgctaaatt

SEQ ID NO: 56848 - DNA, 50 bp, synthetic construct
  source 1..50: mol_type = other DNA
tttacgtcgcattttatcaactccatgtggaggaaaacatggcaatcccg

SEQ ID NO: 56849 - DNA, 50 bp, synthetic construct
  source 1..50: mol_type = other DNA
tttctatcagactataacaatatacttacgtacctatagtccgattcctt

SEQ ID NO: 56850 - DNA, 50 bp, synthetic construct
  source 1..50: mol_type = other DNA
ttttgcagaattacacgcagccaccagtggttttgtcaattactgcaatg

SEQ ID NO: 56851 - DNA, 50 bp, synthetic construct
  source 1..50: mol_type = other DNA
catgaaaaccatgcggataaatgggccgctttttccagtcaattttgggt

SEQ ID NO: 56852 - DNA, 50 bp, synthetic construct
  source 1..50: mol_type = other DNA
tgcgacatggaacggaaaagggggaaccgccttagattttccatgtgatt

SEQ ID NO: 56853 - DNA, 50 bp, synthetic construct
  source 1..50: mol_type = other DNA
tgattttcctggccttctttgctatatagaaaagaaagaagaggaaacca

SEQ ID NO: 56854 - DNA, 50 bp, synthetic construct
  source 1..50: mol_type = other DNA
cagcccaacgccatcgccttttccgaggaaaaagatatgcgaagaaatga

SEQ ID NO: 56855 - DNA, 50 bp, synthetic construct
  source 1..50: mol_type = other DNA
ggcgatggctgccgctgcgcgcattccggcggacagcggcagcgtgcggc

SEQ ID NO: 56856 - DNA, 50 bp, synthetic construct
  source 1..50: mol_type = other DNA
aaaacgtgatacgctcttggtcacgattgtacttgctattattggctttc

SEQ ID NO: 56857 - DNA, 50 bp, synthetic construct
  source 1..50: mol_type = other DNA
atttcggtttagttcagatgtggctgatatatagactaccaaaacgaaag

SEQ ID NO: 56858 - DNA, 50 bp, synthetic construct
  source 1..50: mol_type = other DNA
accagtatctgctggagcaaggggtgccgctttttccagtcaattctggg

SEQ ID NO: 56859 - DNA, 50 bp, synthetic construct
  source 1..50: mol_type = other DNA
gaaatgctcataaaattcaaatggatgcgattgaacaatatgctcataat

SEQ ID NO: 56860 - DNA, 50 bp, synthetic construct
  source 1..50: mol_type = other DNA
caataagctcctgcaaaatatccagctgcataatttgacgtaaatcatca

SEQ ID NO: 56861 - DNA, 50 bp, synthetic construct
  source 1..50: mol_type = other DNA
acattatcctccgtactgtatgaattcagatgaagtacggaggtaaaaaa

SEQ ID NO: 56862 - DNA, 50 bp, synthetic construct
  source 1..50: mol_type = other DNA
gtaatctgttatgtacaacataaacatttatgttatacacaaaaaaaccg

SEQ ID NO: 56863 - DNA, 50 bp, synthetic construct
  source 1..50: mol_type = other DNA
cttcaactcttgtttcgcggttagatatgtccgtaccgaaagagaggtga

SEQ ID NO: 56864 - DNA, 50 bp, synthetic construct
  source 1..50: mol_type = other DNA
agataaatgggaagtgttttgcagatacagaaaaggctctccaattttcc

SEQ ID NO: 56865 - DNA, 50 bp, synthetic construct
  source 1..50: mol_type = other DNA
cgcacaaaaactaaatcagatgaaagcttttttaggaggatttctgtatg

SEQ ID NO: 56866 - DNA, 50 bp, synthetic construct
  source 1..50: mol_type = other DNA
gccgcacgctgccgctgcccgccggaatgcgcgcagcggcagccatcgcc

SEQ ID NO: 56867 - DNA, 50 bp, synthetic construct
  source 1..50: mol_type = other DNA
attttcccgtttcctcaaaacctaaatagtttatacggaaacctttatcc

SEQ ID NO: 56868 - DNA, 50 bp, synthetic construct
  source 1..50: mol_type = other DNA
gtttgcaaactcgatatacagcgatggggctttatatcggatctgcacat

SEQ ID NO: 56869 - DNA, 50 bp, synthetic construct
  source 1..50: mol_type = other DNA
tggccgtccatatccatccggtcagttctccgtatgattatctatagaga

SEQ ID NO: 56870 - DNA, 50 bp, synthetic construct
  source 1..50: mol_type = other DNA
tctcaggctcatgttccggtggtgtcaacccgagggctgatgtagtaaaa

SEQ ID NO: 56871 - DNA, 50 bp, synthetic construct
  source 1..50: mol_type = other DNA
aatgaagaccagattcacagttttaagagacggtgacatcgaccgtcccg

SEQ ID NO: 56872 - DNA, 50 bp, synthetic construct
  source 1..50: mol_type = other DNA
catcaagagaaagctgcccgtccgttccaagattcagaaagccattgaac

SEQ ID NO: 56873 - DNA, 50 bp, synthetic construct
  source 1..50: mol_type = other DNA
gcgcatgagaagattgattgacaacggtgttcatcaattttatctgaagc

SEQ ID NO: 56874 - DNA, 50 bp, synthetic construct
  source 1..50: mol_type = other DNA
tatttctgttactaaaatatggaggactgatttatatggcaagagaaatc

SEQ ID NO: 56875 - DNA, 50 bp, synthetic construct
  source 1..50: mol_type = other DNA
ataatagcgtaatccagccttactttagtaaagccgcgggccggtagtaa

SEQ ID NO: 56876 - DNA, 50 bp, synthetic construct
  source 1..50: mol_type = other DNA
tatgtaatagcaaaagaactcaatcgttttatagcgatttgttggatata

SEQ ID NO: 56877 - DNA, 50 bp, synthetic construct
  source 1..50: mol_type = other DNA
ggttgataaatggcgaaaagaattattcagtttcgcgccattttttaact

SEQ ID NO: 56878 - DNA, 50 bp, synthetic construct
  source 1..50: mol_type = other DNA
attatttttttatagctttatgtgtaccaataaaaaaattgtggttatcc

SEQ ID NO: 56879 - DNA, 50 bp, synthetic construct
  source 1..50: mol_type = other DNA
tggtacaatatcattgccgatgaattaaaagaacagcagatattgagaaa

SEQ ID NO: 56880 - DNA, 50 bp, synthetic construct
  source 1..50: mol_type = other DNA
cgcaccacagaaaggagcttaatcatccgcgcgctccttgctgggcgcga

SEQ ID NO: 56881 - DNA, 50 bp, synthetic construct
  source 1..50: mol_type = other DNA
tatagaattttttgagacatatggatccaatataattcttctgttctctt

SEQ ID NO: 56882 - DNA, 50 bp, synthetic construct
  source 1..50: mol_type = other DNA
atcattgttgatctcggaaaagaaatacttatgcagacaggaaaaatcac

SEQ ID NO: 56883 - DNA, 50 bp, synthetic construct
  source 1..50: mol_type = other DNA
agcgataatccgttcttatagcatatatgttaaaagcagcattatacgcc

SEQ ID NO: 56884 - DNA, 50 bp, synthetic construct
  source 1..50: mol_type = other DNA
tcattttaccacctccgatattttggaaaatttcgggtcagagggccaga

SEQ ID NO: 56885 - DNA, 50 bp, synthetic construct
  source 1..50: mol_type = other DNA
tttattatcaaatgcctttataccatgatactgaccagatagatatggac

SEQ ID NO: 56886 - DNA, 50 bp, synthetic construct
  source 1..50: mol_type = other DNA
gatacaaatactgtttcgtaacatctgccacccttatcttcttttcctgt

SEQ ID NO: 56887 - DNA, 50 bp, synthetic construct
  source 1..50: mol_type = other DNA
ttgtccatgaacgaagcggcgcagatctacgcccgcggtttgctggacgg

SEQ ID NO: 56888 - DNA, 50 bp, synthetic construct
  source 1..50: mol_type = other DNA
aatacaccctaagttctaattagggcctcactattaagtgagacttttat

SEQ ID NO: 56889 - DNA, 50 bp, synthetic construct
  source 1..50: mol_type = other DNA
tcaggaagaccagctccacagctttgaagcagaagaacggggagaactta

SEQ ID NO: 56890 - DNA, 50 bp, synthetic construct
  source 1..50: mol_type = other DNA
caagctggctgctctggccgtccatatggttatccgtcccatgaagcttt

SEQ ID NO: 56891 - DNA, 50 bp, synthetic construct
  source 1..50: mol_type = other DNA
ttattttttaaaatttatgattatatgaaaacatataatagaaaacataa

SEQ ID NO: 56892 - DNA, 50 bp, synthetic construct
  source 1..50: mol_type = other DNA
attttgatgatttcgttttcctcaaaggagcgaaaagaaatggccaaatc

SEQ ID NO: 56893 - DNA, 50 bp, synthetic construct
  source 1..50: mol_type = other DNA
gctctaagcatcccgaatacttatcgcttgatattccggccttttagagt

SEQ ID NO: 56894 - DNA, 50 bp, synthetic construct
  source 1..50: mol_type = other DNA
acaatcaccctttattcgtctaacatggaagatatgtgcgccgtacttgt

SEQ ID NO: 56895 - DNA, 50 bp, synthetic construct
  source 1..50: mol_type = other DNA
aagataaataaaaaatagataggcttttctattataatcttaattgtctt

SEQ ID NO: 56896 - DNA, 50 bp, synthetic construct
  source 1..50: mol_type = other DNA
caaaggataaggcacaaggccttaccgcaggagcggtgccatatcccggc

SEQ ID NO: 56897 - DNA, 50 bp, synthetic construct
  source 1..50: mol_type = other DNA
ctgccgtgtttccacggatcaggaagaccttatcctgggtggatgtgaga

SEQ ID NO: 56898 - DNA, 50 bp, synthetic construct
  source 1..50: mol_type = other DNA
agctccatctggctgctttcaccgtccgcagtgtgttttaggaataagcc

SEQ ID NO: 56899 - DNA, 50 bp, synthetic construct
  source 1..50: mol_type = other DNA
tgagtgaggttaaaagctgcccgtttaccggcagctttgaacgggaatca

SEQ ID NO: 56900 - DNA, 50 bp, synthetic construct
  source 1..50: mol_type = other DNA
cgtatggctacgaatgggctgtgtatgcgctgccgtttttggagtggccg

SEQ ID NO: 56901 - DNA, 50 bp, synthetic construct
  source 1..50: mol_type = other DNA
agatgagtagattgaagtgaaagcaacatttcaatacacaaaatcacatt

SEQ ID NO: 56902 - DNA, 50 bp, synthetic construct
  source 1..50: mol_type = other DNA
gtacgaagcatgcagctcagggcagctggatagagcacttgactacgaat

SEQ ID NO: 56903 - DNA, 50 bp, synthetic construct
  source 1..50: mol_type = other DNA
agcttgattagtatacccgacttctcgatgccgggaatgctgtagatcgg

SEQ ID NO: 56904 - DNA, 50 bp, synthetic construct
  source 1..50: mol_type = other DNA
tgatctcgggcggcgcggtgagcacggcccagcgccggagcggtatccgt

SEQ ID NO: 56905 - DNA, 50 bp, synthetic construct
  source 1..50: mol_type = other DNA
cagatacaggtacagagacagtgcgcgcgctgtatatccactttacgctt

SEQ ID NO: 56906 - DNA, 50 bp, synthetic construct
  source 1..50: mol_type = other DNA
atacgaagtcctcctttttcgggataggcgagaaaagagcgctgccggcg

SEQ ID NO: 56907 - DNA, 50 bp, synthetic construct
  source 1..50: mol_type = other DNA
catttccaacatctatgcgctaattcatcagtacatagatgttggaaatg

SEQ ID NO: 56908 - DNA, 50 bp, synthetic construct
  source 1..50: mol_type = other DNA
tgttgtactatctcatacgctcctgtcggtgcgttatagttagtacaaca

SEQ ID NO: 56909 - DNA, 50 bp, synthetic construct
  source 1..50: mol_type = other DNA
ctatctgaaatctattatacatcaaatgacgtagaatagagctttgcaaa

SEQ ID NO: 56910 - DNA, 50 bp, synthetic construct
  source 1..50: mol_type = other DNA
tataatatcatcctcaatatgttctttgcacgatacgctaacttatggtt

SEQ ID NO: 56911 - DNA, 50 bp, synthetic construct
  source 1..50: mol_type = other DNA
gtgagcagattgatgataaggaaagatgcaggtttcaacaacctgctaat

SEQ ID NO: 56912 - DNA, 50 bp, synthetic construct
  source 1..50: mol_type = other DNA
tcctttcttttccggtagtgtctataatgaaagaaaacgaagaaaaagca

SEQ ID NO: 56913 - DNA, 50 bp, synthetic construct
  source 1..50: mol_type = other DNA
tcttatactcaaagaaaaactctgaacagaatccgctcctgatacggatt

SEQ ID NO: 56914 - DNA, 50 bp, synthetic construct
  source 1..50: mol_type = other DNA
cccgaatatccgtcatcaatataaattcttggacgcaaagaatatttggg

SEQ ID NO: 56915 - DNA, 50 bp, synthetic construct
  source 1..50: mol_type = other DNA
ctaataagtataagattaagaagtataacattatatctgatattacagct

SEQ ID NO: 56916 - DNA, 50 bp, synthetic construct
  source 1..50: mol_type = other DNA
aaatcatcatatctgtgcttttcttcagaagaagaaaatgatgatgatat

SEQ ID NO: 56917 - DNA, 50 bp, synthetic construct
  source 1..50: mol_type = other DNA
atatttttttacaagtttttctttatcgacctgagcttcaaaactgtgga

SEQ ID NO: 56918 - DNA, 50 bp, synthetic construct
  source 1..50: mol_type = other DNA
atactttttttaaaataaaaccaagtcctgttttataagaaaggaatgat

SEQ ID NO: 56919 - DNA, 50 bp, synthetic construct
  source 1..50: mol_type = other DNA
tttcacttctggaatagttcttccaatttcggacatttcccattttgaaa

SEQ ID NO: 56920 - DNA, 50 bp, synthetic construct
  source 1..50: mol_type = other DNA
tctccacccaatcggtgaattcggtgccgagttgtccgattgatagacgg

SEQ ID NO: 56921 - DNA, 50 bp, synthetic construct
  source 1..50: mol_type = other DNA
ttttacttgaacatatacagttttataacggactttacttcattgaaaag

SEQ ID NO: 56922 - DNA, 50 bp, synthetic construct
  source 1..50: mol_type = other DNA
ttttcgctcgcaaagctccgcaagatcttgtcatgttttgtacaaaaaat

SEQ ID NO: 56923 - DNA, 50 bp, synthetic construct
  source 1..50: mol_type = other DNA
ttttttgtgcattaacagtcttcttaaaaaatcttttaaagacagaaaaa

SEQ ID NO: 56924 - DNA, 50 bp, synthetic construct
  source 1..50: mol_type = other DNA
ggaaaatataaacatccgcaaaatcacccttgctgacagatacaaattat

SEQ ID NO: 56925 - DNA, 50 bp, synthetic construct
  source 1..50: mol_type = other DNA
tcgaatgtattgccgacaatttctgcactaacatactgccataggcatgg

SEQ ID NO: 56926 - DNA, 50 bp, synthetic construct
  source 1..50: mol_type = other DNA
aaaagaaatttatttaatgataatagcatattataatgtaaatcgcgtta

SEQ ID NO: 56927 - DNA, 50 bp, synthetic construct
  source 1..50: mol_type = other DNA
cccacagcaatcctgtacgccgggcaccttgcgggcaggattgcaaaccc

SEQ ID NO: 56928 - DNA, 50 bp, synthetic construct
  source 1..50: mol_type = other DNA
atatttttcctccactaaaaaaggtacttttatttgtggattgtaaattg

SEQ ID NO: 56929 - DNA, 50 bp, synthetic construct
  source 1..50: mol_type = other DNA
acggcatccgaatcaaccggagaccagtaccaggttgcggttataatcca

SEQ ID NO: 56930 - DNA, 50 bp, synthetic construct
  source 1..50: mol_type = other DNA
catcagacataagatccggttccttgatgaaccagaactggaagaagaaa

SEQ ID NO: 56931 - DNA, 50 bp, synthetic construct
  source 1..50: mol_type = other DNA
tggatacctttcacctttctttccttttcccgaaagaacaatgccatcac

SEQ ID NO: 56932 - DNA, 50 bp, synthetic construct
  source 1..50: mol_type = other DNA
acaccatatggatatgacatcattggaataagaatctctcaatatgatga

SEQ ID NO: 56933 - DNA, 50 bp, synthetic construct
  source 1..50: mol_type = other DNA
gtataaaaataacagccagcggggaaccgtgcctgtgcggatctttacgg

SEQ ID NO: 56934 - DNA, 50 bp, synthetic construct
  source 1..50: mol_type = other DNA
atttatcattctctgaaattcaggtctgcctttttaacagattgtaaata

SEQ ID NO: 56935 - DNA, 50 bp, synthetic construct
  source 1..50: mol_type = other DNA
ttttcgccttgtctaccagcaagccggcgaggaacagcccaaggaaaaca

SEQ ID NO: 56936 - DNA, 50 bp, synthetic construct
  source 1..50: mol_type = other DNA
caacgtgtttttttaccataatattattgtgatgggaaaaatgtacgatg

SEQ ID NO: 56937 - DNA, 50 bp, synthetic construct
  source 1..50: mol_type = other DNA
ttctcggatacctttcacctttttataataaaatccagcacagaaataaa

SEQ ID NO: 56938 - DNA, 50 bp, synthetic construct
  source 1..50: mol_type = other DNA
ccaatggagtaaagatactgcaatggattgaagtagttacaactaattat

SEQ ID NO: 56939 - DNA, 50 bp, synthetic construct
  source 1..50: mol_type = other DNA
ttgtggctgatggtttgctacaaattatatcattaaaaccccaaaaaaaa

SEQ ID NO: 56940 - DNA, 50 bp, synthetic construct
  source 1..50: mol_type = other DNA
tattagtcaagtaatcagcaaccctgatgtggtcgagaacttgattcatg

SEQ ID NO: 56941 - DNA, 50 bp, synthetic construct
  source 1..50: mol_type = other DNA
ttatttcctgaaaactcaagcgttcaagcggttttattttctcggtccgc

SEQ ID NO: 56942 - DNA, 50 bp, synthetic construct
  source 1..50: mol_type = other DNA
cgtcatcaacagtgccgaggccgatatcggcaacaagcacagccccacca

SEQ ID NO: 56943 - DNA, 50 bp, synthetic construct
  source 1..50: mol_type = other DNA
caagggagtgagatataatgattgtcaaaaaacagcaaggcgaccccttg

SEQ ID NO: 56944 - DNA, 50 bp, synthetic construct
  source 1..50: mol_type = other DNA
ctcacgagccatgccttctgaaatatctctcggaataattgcttcgtgat

SEQ ID NO: 56945 - DNA, 50 bp, synthetic construct
  source 1..50: mol_type = other DNA
acccatctgctcacaaatagcatcaagggtgtatgtgtcatgctctcacc

SEQ ID NO: 56946 - DNA, 50 bp, synthetic construct
  source 1..50: mol_type = other DNA
gaggattttcttgagaagtgcagatttctgcagaagcctattccaagcat

SEQ ID NO: 56947 - DNA, 50 bp, synthetic construct
  source 1..50: mol_type = other DNA
gcctttttattaaagtggacatatgtatatgtccacttttattaattcct

SEQ ID NO: 56948 - DNA, 50 bp, synthetic construct
  source 1..50: mol_type = other DNA
ttttctatgttctgtgcaaataatccatcgcaaacttcaaaacgtctttt

SEQ ID NO: 56949 - DNA, 50 bp, synthetic construct
  source 1..50: mol_type = other DNA
caagcgaatatcggtaaataatgtagacattggaattaaatattcaagac

SEQ ID NO: 56950 - DNA, 50 bp, synthetic construct
  source 1..50: mol_type = other DNA
aaaaatgaaaagtacattggcacttatcaaacaatgtaatttcccggttt

SEQ ID NO: 56951 - DNA, 50 bp, synthetic construct
  source 1..50: mol_type = other DNA
gattttctctttttctggcataaaatttcataaagaaaccccggaaaatc

SEQ ID NO: 56952 - DNA, 50 bp, synthetic construct
  source 1..50: mol_type = other DNA
atcgtcctttctctgaatataaatatatttatgatgtacttaaacggatg

SEQ ID NO: 56953 - DNA, 50 bp, synthetic construct
  source 1..50: mol_type = other DNA
aagttctgccactcctttctctttggaaaatgaacagcgtgttgccgtat

SEQ ID NO: 56954 - DNA, 50 bp, synthetic construct
  source 1..50: mol_type = other DNA
cccatcaaaaaaagagccccatagtagaaggaggctctttttatgcctaa

SEQ ID NO: 56955 - DNA, 50 bp, synthetic construct
  source 1..50: mol_type = other DNA
taccaaaactgcgctacacccggatatcggcgatcagcagcttcttgctc

SEQ ID NO: 56956 - DNA, 50 bp, synthetic construct
  source 1..50: mol_type = other DNA
actctaaaagctattaatagcaagctctttttcaaaatagacagatatgt

SEQ ID NO: 56957 - DNA, 50 bp, synthetic construct
  source 1..50: mol_type = other DNA
taactgctcataaaattcaggatactgttctattattttaacatatcttc

SEQ ID NO: 56958 - DNA, 50 bp, synthetic construct
  source 1..50: mol_type = other DNA
cgaggaagtgtcgagcagcggggccggacggcgagctgggcgcgtccctg

SEQ ID NO: 56959 - DNA, 50 bp, synthetic construct
  source 1..50: mol_type = other DNA
ttcccttttttaatactattggatatagccaataagcgtggggaataaaa

SEQ ID NO: 56960 - DNA, 50 bp, synthetic construct
  source 1..50: mol_type = other DNA
cagcataaccggctcgccgtacatttatgtacggagcaggctttaagtct

SEQ ID NO: 56961 - DNA, 50 bp, synthetic construct
  source 1..50: mol_type = other DNA
acgtaatcgactatcctgccctgctcggcgcttgaaatagtcggcagaat

SEQ ID NO: 56962 - DNA, 50 bp, synthetic construct
  source 1..50: mol_type = other DNA
cttcctttcaactaagccttgcaaaatttcaaccggaggtaaaaatatgg

SEQ ID NO: 56963 - DNA, 50 bp, synthetic construct
  source 1..50: mol_type = other DNA
gtcataaaaaatcatcctccttaaaactacggaggatatgaagtctttca

SEQ ID NO: 56964 - DNA, 50 bp, synthetic construct
  source 1..50: mol_type = other DNA
tgttgtactaaccataacgcacctacaggagcgtataagatagtacaaca

SEQ ID NO: 56965 - DNA, 50 bp, synthetic construct
  source 1..50: mol_type = other DNA
ttaattgaaatagtgaacagaatcaagtaacctgaaaataactcttttac

SEQ ID NO: 56966 - DNA, 50 bp, synthetic construct
  source 1..50: mol_type = other DNA
gcagatgaaggaatctccgcaactaaagtagagacttatatctcatctga

SEQ ID NO: 56967 - DNA, 50 bp, synthetic construct
  source 1..50: mol_type = other DNA
agttgcagttttttaatttgattagttaaagcaattcgtaaactgaaaga

SEQ ID NO: 56968 - DNA, 50 bp, synthetic construct
  source 1..50: mol_type = other DNA
taactcacctccactttcacttgtatatcccagaaagtgattgtggttta

SEQ ID NO: 56969 - DNA, 50 bp, synthetic construct
  source 1..50: mol_type = other DNA
tgagaaaccggcttgccaagagaatcctttctttgctgtgcggtctttct

SEQ ID NO: 56970 - DNA, 50 bp, synthetic construct
  source 1..50: mol_type = other DNA
agacagccgttagttttaactaacttacattctatcatatcgggctttct

SEQ ID NO: 56971 - DNA, 50 bp, synthetic construct
  source 1..50: mol_type = other DNA
tttttttgcttataaccagatttggaaactcaagacttattatgaaagaa

SEQ ID NO: 56972 - DNA, 50 bp, synthetic construct
  source 1..50: mol_type = other DNA
gattttagccatgaaatcactcctttccgcctgacgcgcaccgccatacg

SEQ ID NO: 56973 - DNA, 50 bp, synthetic construct
  source 1..50: mol_type = other DNA
gaaatttctgctttttttcgacaaatatgtaatatgtctgtagatattaa

SEQ ID NO: 56974 - DNA, 50 bp, synthetic construct
  source 1..50: mol_type = other DNA
cgatatacaggcatgtttcgataatgtacggaaaatgttgcgatatattg

SEQ ID NO: 56975 - DNA, 50 bp, synthetic construct
  source 1..50: mol_type = other DNA
ataccgcataaaaaagttcgggataaatccccaacgctcttataatgcgg

SEQ ID NO: 56976 - DNA, 50 bp, synthetic construct
  source 1..50: mol_type = other DNA
ctgctctttcatttccggcgaccagcgtgagaacgtaaatgaaagtgctg

SEQ ID NO: 56977 - DNA, 50 bp, synthetic construct
  source 1..50: mol_type = other DNA
tctatgactctctccatgtcgttcacctccgccattattctacaaagaga

SEQ ID NO: 56978 - DNA, 50 bp, synthetic construct
  source 1..50: mol_type = other DNA
cgttgacgaactggatgcgctgctctgcaggcgcatgaggttctccatcg

SEQ ID NO: 56979 - DNA, 50 bp, synthetic construct
  source 1..50: mol_type = other DNA
gctttcgagcgtcagatgatttccctcgatataatcggacagcgaaacat

SEQ ID NO: 56980 - DNA, 50 bp, synthetic construct
  source 1..50: mol_type = other DNA
attaatactgctgtaattctttttgctaaaagaaacaatatggaagttat

SEQ ID NO: 56981 - DNA, 50 bp, synthetic construct
  source 1..50: mol_type = other DNA
ctgtgcgccgttcatttgtgaattgttatatgatttatattgaagcattt

SEQ ID NO: 56982 - DNA, 50 bp, synthetic construct
  source 1..50: mol_type = other DNA
attccgttttcgtttcaggcagataagctgagaaagaatgctctcagcat

SEQ ID NO: 56983 - DNA, 50 bp, synthetic construct
  source 1..50: mol_type = other DNA
gctccggcttttccctcccagtaatattggggctatttttatgccctttt

SEQ ID NO: 56984 - DNA, 50 bp, synthetic construct
  source 1..50: mol_type = other DNA
tgcggtcatccgtataccggtatcggtttacttatatacggagaagcgat

SEQ ID NO: 56985 - DNA, 50 bp, synthetic construct
  source 1..50: mol_type = other DNA
gaagaacagctatcaagttatgagaaagcatacgttgatactttatcttc

SEQ ID NO: 56986 - DNA, 50 bp, synthetic construct
  source 1..50: mol_type = other DNA
gcctagtactgttgattagatacggtcatatctcaagctcagaaaaaggt

SEQ ID NO: 56987 - DNA, 50 bp, synthetic construct
  source 1..50: mol_type = other DNA
tctccacggacagcgaggagcagctcgctgtgcctgtgcctcctgcgatt

SEQ ID NO: 56988 - DNA, 50 bp, synthetic construct
  source 1..50: mol_type = other DNA
agaaattcgagcataaacagaaaatcttttccgtttcagcgtattcctct

SEQ ID NO: 56989 - DNA, 50 bp, synthetic construct
  source 1..50: mol_type = other DNA
ttgtttagtctgactttatcataatactatatggcacgcaccataaaaaa

SEQ ID NO: 56990 - DNA, 50 bp, synthetic construct
  source 1..50: mol_type = other DNA
gcctttcgtatgaaaaaactaaaatttcaggctttttgacaatgaaaatg

SEQ ID NO: 56991 - DNA, 50 bp, synthetic construct
  source 1..50: mol_type = other DNA
ttcaatggtataataaattttgcttatgcaacaatactttgaaagatttt

SEQ ID NO: 56992 - DNA, 50 bp, synthetic construct
  source 1..50: mol_type = other DNA
aggcagagcgtgccgggccgcaggaggctgaggccgagaaaaaagaatga

SEQ ID NO: 56993 - DNA, 50 bp, synthetic construct
  source 1..50: mol_type = other DNA
gcggttcagaatggtatcgggcgtgcaaaaacgggtgcactctgaaacgg

SEQ ID NO: 56994 - DNA, 50 bp, synthetic construct
  source 1..50: mol_type = other DNA
gctgcgtcacctcattgaccagatgcgcttggaaaccgaagtgacgggca

SEQ ID NO: 56995 - DNA, 50 bp, synthetic construct
  source 1..50: mol_type = other DNA
aaagatgctatagaagaccttgtatgtgtatattatatcataaagcctcc

SEQ ID NO: 56996 - DNA, 50 bp, synthetic construct
  source 1..50: mol_type = other DNA
tcatggcaattgcacctctttatttttttataaagctataattgattaaa

SEQ ID NO: 56997 - DNA, 50 bp, synthetic construct
  source 1..50: mol_type = other DNA
aaggcgtcccgccgagaatcctgtgaataggtttttctgtgtaattctgt

SEQ ID NO: 56998 - DNA, 50 bp, synthetic construct
  source 1..50: mol_type = other DNA
cacgaacggttcactcacttttcctccaatcaggctgttgcccattcgaa

SEQ ID NO: 56999 - DNA, 50 bp, synthetic construct
  source 1..50: mol_type = other DNA
ttttcacatgattcaatgcgccgatatcggctaaggcatgacaagaaaag

SEQ ID NO: 57000 - DNA, 50 bp, synthetic construct
  source 1..50: mol_type = other DNA
cgcgagaatcaccgcccagcaggttgccctgctgctttgcttttatgctc

SEQ ID NO: 57001 - DNA, 50 bp, synthetic construct
  source 1..50: mol_type = other DNA
aatttgtcgtatcggcatcaagtaagcaaatgatgcctgtgtggcgtatt

SEQ ID NO: 57002 - DNA, 50 bp, synthetic construct
  source 1..50: mol_type = other DNA
tgcgccaagtggtggagtatgccctggcgcgagctcaccccggaggccca

SEQ ID NO: 57003 - DNA, 50 bp, synthetic construct
  source 1..50: mol_type = other DNA
ggcttcattaaaataatcttttaaaatcaaagggttctttttttgtaccc

SEQ ID NO: 57004 - DNA, 50 bp, synthetic construct
  source 1..50: mol_type = other DNA
gttatttttttgccctagcattgtatacaatttcgcggggtgtttttatt

SEQ ID NO: 57005 - DNA, 50 bp, synthetic construct
  source 1..50: mol_type = other DNA
aggagacgggattttttatttagatatgctgatgaaggctcggccatcct

SEQ ID NO: 57006 - DNA, 50 bp, synthetic construct
  source 1..50: mol_type = other DNA
aaaccgattgagattacagatagtataataaataagcactcaagagagag

SEQ ID NO: 57007 - DNA, 50 bp, synthetic construct
  source 1..50: mol_type = other DNA
tatacgtaccacctttcctaaaaatatattgtagtgaggtggttcaatgg

SEQ ID NO: 57008 - DNA, 50 bp, synthetic construct
  source 1..50: mol_type = other DNA
taggtgtagacttctttaccctctatccacgttaaagacctccattatgt

SEQ ID NO: 57009 - DNA, 50 bp, synthetic construct
  source 1..50: mol_type = other DNA
tgcctgtgctttgtggcgcagccccctgtcgttctatcaggtcaacacac

SEQ ID NO: 57010 - DNA, 50 bp, synthetic construct
  source 1..50: mol_type = other DNA
tttctgtcttagtatgaagcaccactgagcgcttcgctgccggagaaaaa

SEQ ID NO: 57011 - DNA, 50 bp, synthetic construct
  source 1..50: mol_type = other DNA
cattccagtgtcctcctttctctaattagagatagagccggaagatatgc

SEQ ID NO: 57012 - DNA, 50 bp, synthetic construct
  source 1..50: mol_type = other DNA
aagaatggcaagggtcaggtttcctgggtataaaattaactgcctttctt

SEQ ID NO: 57013 - DNA, 50 bp, synthetic construct
  source 1..50: mol_type = other DNA
ctgcccacatgattatgtaatccatatctccccaattatcatgggcacag

SEQ ID NO: 57014 - DNA, 50 bp, synthetic construct
  source 1..50: mol_type = other DNA
acaatgcctaaagttaccatgattccaagcccatccgaaaagctcattgc

SEQ ID NO: 57015 - DNA, 50 bp, synthetic construct
  source 1..50: mol_type = other DNA
aatgccatctcaataaaatcaaacaggtcggttcgccgcaggatggcgtt

SEQ ID NO: 57016 - DNA, 50 bp, synthetic construct
  source 1..50: mol_type = other DNA
atatgtatctttgtgtacaactgtatactactttagatattgtagtatat

SEQ ID NO: 57017 - DNA, 50 bp, synthetic construct
  source 1..50: mol_type = other DNA
tcaattaacttttttcggtatttctattgatggcgtgagtgaatagttgt

SEQ ID NO: 57018 - DNA, 50 bp, synthetic construct
  source 1..50: mol_type = other DNA
ttcgccgtatttttcggagaagggtgaagaaaaaccaaaatgtcgcgtgg

SEQ ID NO: 57019 - DNA, 50 bp, synthetic construct
  source 1..50: mol_type = other DNA
ggagagctgcaggatctcggcattgggggtttgagtccctctgcccctgc

SEQ ID NO: 57020 - DNA, 50 bp, synthetic construct
  source 1..50: mol_type = other DNA
gtatactgattcgcattttaatcgccatattgccctctattccttgatat

SEQ ID NO: 57021 - DNA, 50 bp, synthetic construct
  source 1..50: mol_type = other DNA
agagcaacagaaagctgcctactggaaaggagaggacgatatggattcaa

SEQ ID NO: 57022 - DNA, 50 bp, synthetic construct
  source 1..50: mol_type = other DNA
tcaaaccatagaaatttatgcaacattattcataaaaataaatatttata

SEQ ID NO: 57023 - DNA, 50 bp, synthetic construct
  source 1..50: mol_type = other DNA
catttttttaccattgcaaatagtataatatatacaatacggtgaaaatg

SEQ ID NO: 57024 - DNA, 50 bp, synthetic construct
  source 1..50: mol_type = other DNA
gaagttccagtctttttttgggttttaacaaaaacaaagttgccagtagc

SEQ ID NO: 57025 - DNA, 50 bp, synthetic construct
  source 1..50: mol_type = other DNA
gctcgtctgtccaagcggccttcatgtccgagacggccttacagcagatc

SEQ ID NO: 57026 - DNA, 50 bp, synthetic construct
  source 1..50: mol_type = other DNA
tgatatccctccttccggtagtgtctggtgtataacaaggagattttgca

SEQ ID NO: 57027 - DNA, 50 bp, synthetic construct
  source 1..50: mol_type = other DNA
aacccctgaccacttaaccatatgtttttatcagaaatattttcctgttc

SEQ ID NO: 57028 - DNA, 50 bp, synthetic construct
  source 1..50: mol_type = other DNA
attcattgaatattatcccaagaagcatcttaaaataatgatcaaacaat

SEQ ID NO: 57029 - DNA, 50 bp, synthetic construct
  source 1..50: mol_type = other DNA
tgttgtactatcttatacgctcctgtaggtgcgttatggttagtacaaca

SEQ ID NO: 57030 - DNA, 50 bp, synthetic construct
  source 1..50: mol_type = other DNA
atcatatgcatgaatacgaaaaacgccgatttactatacaattataccat

SEQ ID NO: 57031 - DNA, 50 bp, synthetic construct
  source 1..50: mol_type = other DNA
aggaaaaaaggattacggcagagaatgtatgtgagaagagcttttttctt

SEQ ID NO: 57032 - DNA, 50 bp, synthetic construct
  source 1..50: mol_type = other DNA
attagtcaatagtcatgccatcatgctggatagagtgactgactacgaat

SEQ ID NO: 57033 - DNA, 50 bp, synthetic construct
  source 1..50: mol_type = other DNA
agcgccgcagatcatcacgctggggcgctagcctgacgatcggcgtggcg

SEQ ID NO: 57034 - DNA, 50 bp, synthetic construct
  source 1..50: mol_type = other DNA
ataaacaccctctactttatatattaatagaagataaagaaggctttgtt

SEQ ID NO: 57035 - DNA, 50 bp, synthetic construct
  source 1..50: mol_type = other DNA
ttttgaaacacctcgcttaaaatttaaataaggcagagtctattatcgaa

SEQ ID NO: 57036 - DNA, 50 bp, synthetic construct
  source 1..50: mol_type = other DNA
tcaataatattgaaattcaaggatgcacgagactttctcaaatagattac

SEQ ID NO: 57037 - DNA, 50 bp, synthetic construct
  source 1..50: mol_type = other DNA
ataagatttgatgatttacgtcaaattatggtaaacggtccaaacgatat

SEQ ID NO: 57038 - DNA, 50 bp, synthetic construct
  source 1..50: mol_type = other DNA
ctctctacaaaaatatgatccagtccgcaagggtttattttttatactct

SEQ ID NO: 57039 - DNA, 50 bp, synthetic construct
  source 1..50: mol_type = other DNA
aatagtatagcacggtgcggatgggttgatcggctggcggctcttgcatt

SEQ ID NO: 57040 - DNA, 50 bp, synthetic construct
  source 1..50: mol_type = other DNA
ttctgcatttatcaaagatatgaccggtatcatttttggtatatgaaagt

SEQ ID NO: 57041 - DNA, 50 bp, synthetic construct
  source 1..50: mol_type = other DNA
ccgcaggcaactttattttaagagaaggaggaaaaagcgtggcgaaagta

SEQ ID NO: 57042 - DNA, 50 bp, synthetic construct
  source 1..50: mol_type = other DNA
tcaatcaactattatttaaattttatggagtttattatgttggtgaaaca

SEQ ID NO: 57043 - DNA, 50 bp, synthetic construct
  source 1..50: mol_type = other DNA
tattattatttttttgcattaaaaaatcggctttgaaatattatataata

SEQ ID NO: 57044 - DNA, 50 bp, synthetic construct
  source 1..50: mol_type = other DNA
ctatgcatcaaaagcgaaggaagacggctggatttgccactaatgctttt

SEQ ID NO: 57045 - DNA, 50 bp, synthetic construct
  source 1..50: mol_type = other DNA
gtccacacaggacatcagagcctcataggttaagaaaacacctgctgagc

SEQ ID NO: 57046 - DNA, 50 bp, synthetic construct
  source 1..50: mol_type = other DNA
ttaccgccactttcattatatttatatccatagggtatgtgtgccattat

SEQ ID NO: 57047 - DNA, 50 bp, synthetic construct
  source 1..50: mol_type = other DNA
caaagctagtcaaccgcatttgtgtaccgaaaatacgttgattatatctc

SEQ ID NO: 57048 - DNA, 50 bp, synthetic construct
  source 1..50: mol_type = other DNA
ggcacccggtatgatcccgatcccgcagaattgacttgataattatcgct

SEQ ID NO: 57049 - DNA, 50 bp, synthetic construct
  source 1..50: mol_type = other DNA
tacactttctctccaatatttttaccagaaaatgaaacagataaggagtg

SEQ ID NO: 57050 - DNA, 50 bp, synthetic construct
  source 1..50: mol_type = other DNA
gtactcatccaccatgatatatttgaaacgaggttattatggctgctatt

SEQ ID NO: 57051 - DNA, 50 bp, synthetic construct
  source 1..50: mol_type = other DNA
tagcaagtacaatctgcgatacctttatccataaaggaatggatttcatc

SEQ ID NO: 57052 - DNA, 50 bp, synthetic construct
  source 1..50: mol_type = other DNA
tgtggtagacatatagcaaatcgcctacgatttcttatactactacagta

SEQ ID NO: 57053 - DNA, 50 bp, synthetic construct
  source 1..50: mol_type = other DNA
attcctgtgcctatcatcactgtcgccagagtgtcgatggaatccgagcg

SEQ ID NO: 57054 - DNA, 50 bp, synthetic construct
  source 1..50: mol_type = other DNA
aagaggccatccagaatgcgctggatctgggcgcttttgttattcatact

SEQ ID NO: 57055 - DNA, 50 bp, synthetic construct
  source 1..50: mol_type = other DNA
ccatacggatacagaattgtcgatggcggaaagtttgtgtatgcagatgg

SEQ ID NO: 57056 - DNA, 50 bp, synthetic construct
  source 1..50: mol_type = other DNA
ttaaaaattcccattgccgttctttgagcaggctgaatatgaatatagct

SEQ ID NO: 57057 - DNA, 50 bp, synthetic construct
  source 1..50: mol_type = other DNA
ttccttattgatgaaacgaggtgatgtgtcaactgattgactgacaggaa

SEQ ID NO: 57058 - DNA, 50 bp, synthetic construct
  source 1..50: mol_type = other DNA
tttaaatatgactctaaattgggatatctatggatagaatcatagaaaaa

SEQ ID NO: 57059 - DNA, 50 bp, synthetic construct
  source 1..50: mol_type = other DNA
gctgttttgtttgcaacgataacttcagtatgacggataaacaaaacgaa

SEQ ID NO: 57060 - DNA, 50 bp, synthetic construct
  source 1..50: mol_type = other DNA
gttttacgctctaaccacgatctcaataatgttggcagagaatttacagg

SEQ ID NO: 57061 - DNA, 50 bp, synthetic construct
  source 1..50: mol_type = other DNA
atatattaggtattgacaaacaaaattttgacagtctataccgcgagaat

SEQ ID NO: 57062 - DNA, 50 bp, synthetic construct
  source 1..50: mol_type = other DNA
attccaaatattcgttggggggatgaatgagtgggctgaatacttgataa

SEQ ID NO: 57063 - DNA, 50 bp, synthetic construct
  source 1..50: mol_type = other DNA
gaagatgatggattttccagatccacacattcggaaaatccgaatggcag

SEQ ID NO: 57064 - DNA, 50 bp, synthetic construct
  source 1..50: mol_type = other DNA
ttcatgcgttcgctcatccgttgtcgtgaaccgctcttcgtacgcttggc

SEQ ID NO: 57065 - DNA, 50 bp, synthetic construct
  source 1..50: mol_type = other DNA
tcaccatatatcactgaaacggagcgtgccgtagcagttatagatgaagc

SEQ ID NO: 57066 - DNA, 50 bp, synthetic construct
  source 1..50: mol_type = other DNA
acataaaaatcagtcctttcgtaggccacagtagatgatgccggttaatg

SEQ ID NO: 57067 - DNA, 50 bp, synthetic construct
  source 1..50: mol_type = other DNA
actacaaaagatttctgacaaaaacatttttgtgcgacatcgcacatata

SEQ ID NO: 57068 - DNA, 50 bp, synthetic construct
  source 1..50: mol_type = other DNA
aaatgggtataaaaaatacagccagcgctccggatcttttatcatgcatt

SEQ ID NO: 57069 - DNA, 50 bp, synthetic construct
  source 1..50: mol_type = other DNA
ctgcgggctctttttgacttttttgaagagtagtacgaactatgccgcag

SEQ ID NO: 57070 - DNA, 50 bp, synthetic construct
  source 1..50: mol_type = other DNA
aagagtagtacgaactatgccgcagatcccaccgaaggtggagtattctc

SEQ ID NO: 57071 - DNA, 50 bp, synthetic construct
  source 1..50: mol_type = other DNA
atttcctctagaattgatggcgggattcagaagaacatccacgatgaaat

SEQ ID NO: 57072 - DNA, 50 bp, synthetic construct
  source 1..50: mol_type = other DNA
agagtacagggatgacctgattgcttcttctccggagatgaccgttctac

SEQ ID NO: 57073 - DNA, 50 bp, synthetic construct
  source 1..50: mol_type = other DNA
aatggcaacaaaaaaagacagtttaattactctcttcatcaggctccatt

SEQ ID NO: 57074 - DNA, 50 bp, synthetic construct
  source 1..50: mol_type = other DNA
taagactgtttattctgagcgtggaaaattgttcagaataaacttcacta

SEQ ID NO: 57075 - DNA, 50 bp, synthetic construct
  source 1..50: mol_type = other DNA
ttcgcttttcatcgttttttcggttttccggtaaaggtttcaaaacctaa

SEQ ID NO: 57076 - DNA, 50 bp, synthetic construct
  source 1..50: mol_type = other DNA
tataataaggaaagctattcaccaaaatttgaacgcctggggcagcaaat

SEQ ID NO: 57077 - DNA, 50 bp, synthetic construct
  source 1..50: mol_type = other DNA
ttaatgacgccagtgacccgaggtgcatacagggtctctgtccacagggt

SEQ ID NO: 57078 - DNA, 50 bp, synthetic construct
  source 1..50: mol_type = other DNA
aatttcaatacatggtttggatatgctatgccaaaccttgggtccaaata

SEQ ID NO: 57079 - DNA, 50 bp, synthetic construct
  source 1..50: mol_type = other DNA
cctttcagtgtcacatattacctctatgttttacgactgacatttaacca

SEQ ID NO: 57080 - DNA, 50 bp, synthetic construct
  source 1..50: mol_type = other DNA
gctcttcttttagccaccggcatcacttgacatatgattaaaaagtgata

SEQ ID NO: 57081 - DNA, 50 bp, synthetic construct
  source 1..50: mol_type = other DNA
taactcaactccgaaaggggagaaagctgcccacttcagaagttgttcta

SEQ ID NO: 57082 - DNA, 50 bp, synthetic construct
  source 1..50: mol_type = other DNA
gtataccagttgatgaaaggggcttcagcaccaatcatatacttacttaa

SEQ ID NO: 57083 - DNA, 50 bp, synthetic construct
  source 1..50: mol_type = other DNA
ggaaaagcctaatattctggagtttaaaaagcctgtcgttaggcgtttta

SEQ ID NO: 57084 - DNA, 50 bp, synthetic construct
  source 1..50: mol_type = other DNA
agaccttgagatgctcttcgcgcaaccgatgcggcaacgtcgttttcact

SEQ ID NO: 57085 - DNA, 50 bp, synthetic construct
  source 1..50: mol_type = other DNA
cctactcacagtgggacaccttcctccgctcttgcgccatctgaaataaa

SEQ ID NO: 57086 - DNA, 50 bp, synthetic construct
  source 1..50: mol_type = other DNA
ggaattaaatgttattaccactcctaagattacttcccacgtttaattat

SEQ ID NO: 57087 - DNA, 50 bp, synthetic construct
  source 1..50: mol_type = other DNA
agattgaggttgagttataaggctcgaccctaccgactgggacctcgtgc

SEQ ID NO: 57088 - DNA, 50 bp, synthetic construct
  source 1..50: mol_type = other DNA
attgtaaaaggactatggcagggtatgaagaaaataaggaaggagaaaaa

SEQ ID NO: 57089 - DNA, 50 bp, synthetic construct
  source 1..50: mol_type = other DNA
ttcattggaaattctgaggaatgttttcatacaaattaggttcagatgaa

SEQ ID NO: 57090 - DNA, 50 bp, synthetic construct
  source 1..50: mol_type = other DNA
aaatacgtataattttacgctaattttttagtgttttttcgtaaaaattc

SEQ ID NO: 57091 - DNA, 50 bp, synthetic construct
  source 1..50: mol_type = other DNA
gcctgttacaaacaactatgcatcaagacccctatttgtttaatattatc

SEQ ID NO: 57092 - DNA, 50 bp, synthetic construct
  source 1..50: mol_type = other DNA
aaagactctgaccttctaaatagaatttttttaagaatttccgcctcttt

SEQ ID NO: 57093 - DNA, 50 bp, synthetic construct
  source 1..50: mol_type = other DNA
tcttgcgtaaattactgctttcatacatcaatgcggatattatcgcagat

SEQ ID NO: 57094 - DNA, 50 bp, synthetic construct
  source 1..50: mol_type = other DNA
taaacctcctcctttcaaataccatatagtatttgattatatagtatttg

SEQ ID NO: 57095 - DNA, 50 bp, synthetic construct
  source 1..50: mol_type = other DNA
gattccatttccattgtaaccatatttgccgtttctttggttaaaaaagc

SEQ ID NO: 57096 - DNA, 50 bp, synthetic construct
  source 1..50: mol_type = other DNA
cataaaaaaaatcagtcctttctgttatcggcgcggatatttttcgtatg

SEQ ID NO: 57097 - DNA, 50 bp, synthetic construct
  source 1..50: mol_type = other DNA
tgccggaattacttccagttcttctggaatcaggaacagaaattacgatc

SEQ ID NO: 57098 - DNA, 50 bp, synthetic construct
  source 1..50: mol_type = other DNA
tgttttcaaggaaaaaacgtcttgtacaagacacttttattggttaatag

SEQ ID NO: 57099 - DNA, 50 bp, synthetic construct
  source 1..50: mol_type = other DNA
tggctgatggtttgctacaaatcatcattataccattaaacccctaaaaa

SEQ ID NO: 57100 - DNA, 50 bp, synthetic construct
  source 1..50: mol_type = other DNA
cggaattatcgtccatatcatgcttgggcatgaatgtcagtcctatcagc

SEQ ID NO: 57101 - DNA, 50 bp, synthetic construct
  source 1..50: mol_type = other DNA
gtggacttgcccgaataaccgcccgagggacagaatacgggctggaacag

SEQ ID NO: 57102 - DNA, 50 bp, synthetic construct
  source 1..50: mol_type = other DNA
ttttaaatagctatcagactactatttagcctttagagtgatatatagta

SEQ ID NO: 57103 - DNA, 50 bp, synthetic construct
  source 1..50: mol_type = other DNA
agtctgttgatctattatctaagctacaagtcgagcagaatcaacacatt

SEQ ID NO: 57104 - DNA, 50 bp, synthetic construct
  source 1..50: mol_type = other DNA
gctcttgactattctttcttccttggaatgaagccagaaaagataagagt

SEQ ID NO: 57105 - DNA, 50 bp, synthetic construct
  source 1..50: mol_type = other DNA
aatagcaacctcttttctttttcttccagcaaagaaaacgatacaagtcg

SEQ ID NO: 57106 - DNA, 50 bp, synthetic construct
  source 1..50: mol_type = other DNA
gtccattgaaagcattctacggggcagccggtagacatgttccccatgac

SEQ ID NO: 57107 - DNA, 50 bp, synthetic construct
  source 1..50: mol_type = other DNA
accaggttcggtattacaaagagtatactcttagctctattagatgaagc

SEQ ID NO: 57108 - DNA, 50 bp, synthetic construct
  source 1..50: mol_type = other DNA
tacagctttttttctattttaatgttcattaactgtaattccaaacaaaa

SEQ ID NO: 57109 - DNA, 50 bp, synthetic construct
  source 1..50: mol_type = other DNA
atggatatttggcttcattactacagagtggaatgaagccggaaaagata

SEQ ID NO: 57110 - DNA, 50 bp, synthetic construct
  source 1..50: mol_type = other DNA
taaagcccatatatcaattgttaaaaaaaacattactgttattccagcaa

SEQ ID NO: 57111 - DNA, 50 bp, synthetic construct
  source 1..50: mol_type = other DNA
cttttttgtgtttataacggcaatttatgaaaacattaaaaacctataag

SEQ ID NO: 57112 - DNA, 50 bp, synthetic construct
  source 1..50: mol_type = other DNA
aatgaatgtaaagaaagtgacaacaaaagtagacttaaattttgttgaga

SEQ ID NO: 57113 - DNA, 50 bp, synthetic construct
  source 1..50: mol_type = other DNA
agattttagaatggatattcaaaaattcttaaatcctaattcttggagat

SEQ ID NO: 57114 - DNA, 50 bp, synthetic construct
  source 1..50: mol_type = other DNA
ataagatatatcaaagtggatttaattgaatgtgtgcttgatgccagcat

SEQ ID NO: 57115 - DNA, 50 bp, synthetic construct
  source 1..50: mol_type = other DNA
cctgagctataggcccaagcttgcgtatttactataaagaaaagctctat

SEQ ID NO: 57116 - DNA, 50 bp, synthetic construct
  source 1..50: mol_type = other DNA
gaattgtcaattcaagtttcaaattcttttgatactttctgcataaatcc

SEQ ID NO: 57117 - DNA, 50 bp, synthetic construct
  source 1..50: mol_type = other DNA
aggtcttctccgagcgcagtctgcgaggtgaagctgcattctgagtacaa

SEQ ID NO: 57118 - DNA, 50 bp, synthetic construct
  source 1..50: mol_type = other DNA
ggataatcacatcaatttttacattaaattcggcctttagagtgatatat

SEQ ID NO: 57119 - DNA, 50 bp, synthetic construct
  source 1..50: mol_type = other DNA
aaataggtagaaatgttataataaagttattcctgccaagaaaactatac

SEQ ID NO: 57120 - DNA, 50 bp, synthetic construct
  source 1..50: mol_type = other DNA
cacaatttcgttgtgtcattccgtcttgattctttctgcatcaacttcat

SEQ ID NO: 57121 - DNA, 50 bp, synthetic construct
  source 1..50: mol_type = other DNA
cactcgacaataagccgccattctgagataaagccacttaagcaatccag

SEQ ID NO: 57122 - DNA, 50 bp, synthetic construct
  source 1..50: mol_type = other DNA
ctatatatcactctaaaggccaaattcagtttctttattttgaggaatag

SEQ ID NO: 57123 - DNA, 50 bp, synthetic construct
  source 1..50: mol_type = other DNA
cgatagtgataaattacggtcagaattctgtccgtatttagccgagatta

SEQ ID NO: 57124 - DNA, 50 bp, synthetic construct
  source 1..50: mol_type = other DNA
ttcaaacagtggacatggatatgagtttatattcagacctgctgaaacaa

SEQ ID NO: 57125 - DNA, 50 bp, synthetic construct
  source 1..50: mol_type = other DNA
aaaacatgaaagatcaacttgtaaaacagcgtaaccaaatttatcaaatt

SEQ ID NO: 57126 - DNA, 50 bp, synthetic construct
  source 1..50: mol_type = other DNA
cctccttattttatcagtactatataatctccacttggtttatagtgctg

SEQ ID NO: 57127 - DNA, 50 bp, synthetic construct
  source 1..50: mol_type = other DNA
cccttggctttagcgtattccgccaatatggaatttgataaagccaagga

SEQ ID NO: 57128 - DNA, 50 bp, synthetic construct
  source 1..50: mol_type = other DNA
agattaaccgaaaaactagaagataactcataatcttcatgttttaagat

SEQ ID NO: 57129 - DNA, 50 bp, synthetic construct
  source 1..50: mol_type = other DNA
gacaaatatcacgcctcttagatttatatcacctccaggtcgtatttgtc

SEQ ID NO: 57130 - DNA, 50 bp, synthetic construct
  source 1..50: mol_type = other DNA
atgatccgctcgacgttctgcacaattgctgcggtcggtgacgcactcat

SEQ ID NO: 57131 - DNA, 50 bp, synthetic construct
  source 1..50: mol_type = other DNA
gtgctccctcctttccagtcccatattccacaaagaaaaggagtatggat

SEQ ID NO: 57132 - DNA, 50 bp, synthetic construct
  source 1..50: mol_type = other DNA
taaacctgtcttatgcgctgctacccccgcttcgatggcagacaggttcc

SEQ ID NO: 57133 - DNA, 50 bp, synthetic construct
  source 1..50: mol_type = other DNA
ttggaaagcaccgtgccaatagcgattctgatcacggtgaccctcttgca

SEQ ID NO: 57134 - DNA, 50 bp, synthetic construct
  source 1..50: mol_type = other DNA
tacatcttttaaagactggacttttgaaataaatgtaactaaaacgctct

SEQ ID NO: 57135 - DNA, 50 bp, synthetic construct
  source 1..50: mol_type = other DNA
tttttaacaattgtgatatattacttttgcgatatttgtatgtagaaaaa

SEQ ID NO: 57136 - DNA, 50 bp, synthetic construct
  source 1..50: mol_type = other DNA
acaaactgcaatatccggtaaacattccacaatcggatattcgtttttgt

SEQ ID NO: 57137 - DNA, 50 bp, synthetic construct
  source 1..50: mol_type = other DNA
tgtcattctcatttcaagttgttgaaaaacaagactaaaacagcgtgatt

SEQ ID NO: 57138 - DNA, 50 bp, synthetic construct
  source 1..50: mol_type = other DNA
tggctcaaataaaatcttagcaatttatgaccgatagttcctttatgctt

SEQ ID NO: 57139 - DNA, 50 bp, synthetic construct
  source 1..50: mol_type = other DNA
gaaaacggctgatatttgttgagcatcgtcaattaatttttttgatttgt

SEQ ID NO: 57140 - DNA, 50 bp, synthetic construct
  source 1..50: mol_type = other DNA
taatctttcacgataatacgtaaatattagattaatttaattaattatta

SEQ ID NO: 57141 - DNA, 50 bp, synthetic construct
  source 1..50: mol_type = other DNA
taatatttgttcatcaatctaagcggaggaagatgctatgtacaatatgt

SEQ ID NO: 57142 - DNA, 50 bp, synthetic construct
  source 1..50: mol_type = other DNA
ggaagcaatactttggaagaagaaaacgcttttgccgctgtacagccccc

SEQ ID NO: 57143 - DNA, 50 bp, synthetic construct
  source 1..50: mol_type = other DNA
cacaaatttatgaaaaagtaaaccgctgttcaagatttctcatttcagct

SEQ ID NO: 57144 - DNA, 50 bp, synthetic construct
  source 1..50: mol_type = other DNA
cgggggatattctctgtctttatgatggcagcaacacaatacccagagcg

SEQ ID NO: 57145 - DNA, 50 bp, synthetic construct
  source 1..50: mol_type = other DNA
tattgtcgtgtatcgaccgatgctgaatatccggtccaaggtacgactta

SEQ ID NO: 57146 - DNA, 50 bp, synthetic construct
  source 1..50: mol_type = other DNA
acaatttaatgaaaaatggcggaaattatatgtttttttgaagaagatga

SEQ ID NO: 57147 - DNA, 50 bp, synthetic construct
  source 1..50: mol_type = other DNA
ataaatccgatgacaatgtcagttatctggtctgctgtttcaagatttat

SEQ ID NO: 57148 - DNA, 50 bp, synthetic construct
  source 1..50: mol_type = other DNA
gcaaatgagatcctgatgatgttccggcattttttcagggccttttttgc

SEQ ID NO: 57149 - DNA, 50 bp, synthetic construct
  source 1..50: mol_type = other DNA
tttagaggcatctccttccatataatctcaaaatcggagatttctttata

SEQ ID NO: 57150 - DNA, 50 bp, synthetic construct
  source 1..50: mol_type = other DNA
ttccgaagagctaaaagaacagttggaaatcttctgtttttcattttctg

SEQ ID NO: 57151 - DNA, 50 bp, synthetic construct
  source 1..50: mol_type = other DNA
ttaaaaagtggcgggaaaccgccactatagcagatgtaatcagcttttat

SEQ ID NO: 57152 - DNA, 50 bp, synthetic construct
  source 1..50: mol_type = other DNA
aaaatattcaaataatttttttgcagaataatcacttataagaaaattta

SEQ ID NO: 57153 - DNA, 50 bp, synthetic construct
  source 1..50: mol_type = other DNA
tcgtttacgcggacaaccgcgcagtttcgatgctttgtatctccaaacgt

SEQ ID NO: 57154 - DNA, 50 bp, synthetic construct
  source 1..50: mol_type = other DNA
catgctctctttcttttttgaatggaggaacagaatggatagtaatcaga

SEQ ID NO: 57155 - DNA, 50 bp, synthetic construct
  source 1..50: mol_type = other DNA
attatttttgggaatttgggggaataattacaaaaatttaacacggaaat

SEQ ID NO: 57156 - DNA, 50 bp, synthetic construct
  source 1..50: mol_type = other DNA
ttttttccgataccgtttgttttctaacgtcccccttaaataactgtgtt

SEQ ID NO: 57157 - DNA, 50 bp, synthetic construct
  source 1..50: mol_type = other DNA
tacgctgttctgaacagccttagacttttaatgctgttcagacacttctt

SEQ ID NO: 57158 - DNA, 50 bp, synthetic construct
  source 1..50: mol_type = other DNA
tcctattgccgtattcgtccttgctcaatataatcaattcgcatcaagga

SEQ ID NO: 57159 - DNA, 50 bp, synthetic construct
  source 1..50: mol_type = other DNA
aggtatttaatatcaatctagtgatttttctatatcattatagcatagac

SEQ ID NO: 57160 - DNA, 50 bp, synthetic construct
  source 1..50: mol_type = other DNA
tatccttgcggactattgaaaatatcccaattgtttagttcgcaagtaaa

SEQ ID NO: 57161 - DNA, 50 bp, synthetic construct
  source 1..50: mol_type = other DNA
ctctgccataaggcatttcattatccataaaaaacgagggtatttccata

SEQ ID NO: 57162 - DNA, 50 bp, synthetic construct
  source 1..50: mol_type = other DNA
ggagcgtgagcggtctttccagacatttctttgggttgtgcagataatca

SEQ ID NO: 57163 - DNA, 50 bp, synthetic construct
  source 1..50: mol_type = other DNA
tttttttcattgtatccctcctttggaaaggagaaatcctcgataaaaaa

SEQ ID NO: 57164 - DNA, 50 bp, synthetic construct
  source 1..50: mol_type = other DNA
tttggtagaatgagtgtagtaaaaatattttgctgcgttggcctgtggtc

SEQ ID NO: 57165 - DNA, 50 bp, synthetic construct
  source 1..50: mol_type = other DNA
agattataaaacggtcagtctttgtcataagactgaccgttttataaata

SEQ ID NO: 57166 - DNA, 50 bp, synthetic construct
  source 1..50: mol_type = other DNA
cgtagcagccgtctttccgcttgccggcaaaatgactgacattggctccg

SEQ ID NO: 57167 - DNA, 50 bp, synthetic construct
  source 1..50: mol_type = other DNA
tttctaagctgtaaaatcagaaacaaagctttgattttaagttttttaaa

SEQ ID NO: 57168 - DNA, 50 bp, synthetic construct
  source 1..50: mol_type = other DNA
ttatagcatagaaaatatgacagctatatgtcttattctctttcctcatt

SEQ ID NO: 57169 - DNA, 50 bp, synthetic construct
  source 1..50: mol_type = other DNA
atccaatatttaacatctaaaatatgtattttttatgtccgaaattaaga

SEQ ID NO: 57170 - DNA, 50 bp, synthetic construct
  source 1..50: mol_type = other DNA
tgtacgatttgatttttcatagttcggcgacgtcgaaatttccgacgttc

SEQ ID NO: 57171 - DNA, 50 bp, synthetic construct
  source 1..50: mol_type = other DNA
agaaggtcacggtcttctggctggcgttgtggtcaagatgcttgctttcc

SEQ ID NO: 57172 - DNA, 50 bp, synthetic construct
  source 1..50: mol_type = other DNA
acaatatcagaactttttgagtatctgacctccttaaaccgggcgatttt

SEQ ID NO: 57173 - DNA, 50 bp, synthetic construct
  source 1..50: mol_type = other DNA
tataagttcaagcgggtgtttcgcaagataaatgcaaaacagagaagtta

SEQ ID NO: 57174 - DNA, 50 bp, synthetic construct
  source 1..50: mol_type = other DNA
taaaataagccagttgcaactaaaaatttagtggataaaggagaactttc

SEQ ID NO: 57175 - DNA, 50 bp, synthetic construct
  source 1..50: mol_type = other DNA
tctgtttttgcttctttttatcctatagactaccaaaaaagaagggagga

SEQ ID NO: 57176 - DNA, 50 bp, synthetic construct
  source 1..50: mol_type = other DNA
ctccttactatgtgtaaacagtcacttaactgcttacacacttcaaaagc

SEQ ID NO: 57177 - DNA, 50 bp, synthetic construct
  source 1..50: mol_type = other DNA
aaaataaaaagtttttatttataaatttcactatatgaatgaccttttga

SEQ ID NO: 57178 - DNA, 50 bp, synthetic construct
  source 1..50: mol_type = other DNA
gctgctttcaattagtatccctcccttgattcttacttagtgaaagtttg

SEQ ID NO: 57179 - DNA, 50 bp, synthetic construct
  source 1..50: mol_type = other DNA
tcaaatcattgagaaaacttttaaaatttattttttactcgtcaaggctg

SEQ ID NO: 57180 - DNA, 50 bp, synthetic construct
  source 1..50: mol_type = other DNA
tgatcgcggctttatcccctgactttcgtccgcatatatcccggcacatt

SEQ ID NO: 57181 - DNA, 50 bp, synthetic construct
  source 1..50: mol_type = other DNA
ctgatcttccgcctggccgaccgcttgcggccgcgcatacgccggatcag

SEQ ID NO: 57182 - DNA, 50 bp, synthetic construct
  source 1..50: mol_type = other DNA
ggccatctgccgccagagtgcccaccgaggacctttgctggaaggccccc

SEQ ID NO: 57183 - DNA, 50 bp, synthetic construct
  source 1..50: mol_type = other DNA
agctaaatctgatggagaacaaaacaatatgttttccatcagtttctcaa

SEQ ID NO: 57184 - DNA, 50 bp, synthetic construct
  source 1..50: mol_type = other DNA
ttactattgattttagttcggaaatcttcggaaacagcttgcaagcggaa

SEQ ID NO: 57185 - DNA, 50 bp, synthetic construct
  source 1..50: mol_type = other DNA
atttgttttgccaatactcctcatgagaaaggatgataagaatggcaaga

SEQ ID NO: 57186 - DNA, 50 bp, synthetic construct
  source 1..50: mol_type = other DNA
tggaaaaaggacaggggagaaatctgggtgaggtcactgtcctttatgac

SEQ ID NO: 57187 - DNA, 50 bp, synthetic construct
  source 1..50: mol_type = other DNA
tatattatatacgacttcatacatttgttattgttccgttatggaacatt

SEQ ID NO: 57188 - DNA, 50 bp, synthetic construct
  source 1..50: mol_type = other DNA
tgaagatgaatactacgagcagaatgttaagctcaaggtaatagtcttat

SEQ ID NO: 57189 - DNA, 50 bp, synthetic construct
  source 1..50: mol_type = other DNA
tgcttttgggctttccttgggaaactacgctcgtagaaagttgtgtggat

SEQ ID NO: 57190 - DNA, 50 bp, synthetic construct
  source 1..50: mol_type = other DNA
agcgcagcccgacgacctacacgcagtccggtagctcgtcgggctcataa

SEQ ID NO: 57191 - DNA, 50 bp, synthetic construct
  source 1..50: mol_type = other DNA
acctttttcatgataactcacctccactaaacaaatatcatgaaaagact

SEQ ID NO: 57192 - DNA, 50 bp, synthetic construct
  source 1..50: mol_type = other DNA
gcagtggcagagctgattaaaatctgtactttaagcagtcctgccaaacg

SEQ ID NO: 57193 - DNA, 50 bp, synthetic construct
  source 1..50: mol_type = other DNA
ccacagccctcacagcagaattcacctgaacccggggatgcggacggtga

SEQ ID NO: 57194 - DNA, 50 bp, synthetic construct
  source 1..50: mol_type = other DNA
tatccatcaccacccacatcaaaacggcttgagctgggcggtgatggcgt

SEQ ID NO: 57195 - DNA, 50 bp, synthetic construct
  source 1..50: mol_type = other DNA
cattcagggatttaccaatgctttgcaagcggaacatacgttccttgctg

SEQ ID NO: 57196 - DNA, 50 bp, synthetic construct
  source 1..50: mol_type = other DNA
tcattattccacctcaaaaaagaaaagatggaaatgtatgggaaacattg

SEQ ID NO: 57197 - DNA, 50 bp, synthetic construct
  source 1..50: mol_type = other DNA
ctgatttctcaggcggtcataacctctgttaaaaagaagggagaatgata

SEQ ID NO: 57198 - DNA, 50 bp, synthetic construct
  source 1..50: mol_type = other DNA
ttgcggtatgaacttttcaggaaatatgcgataggctgttcatatttctt

SEQ ID NO: 57199 - DNA, 50 bp, synthetic construct
  source 1..50: mol_type = other DNA
aattttttattccgcaaacaattcctatcaattttgggtgtatataaaac

SEQ ID NO: 57200 - DNA, 50 bp, synthetic construct
  source 1..50: mol_type = other DNA
cgggtcttttgcgctgccctgtctgcagaaagtatagcacaaaaacgccg

SEQ ID NO: 57201 - DNA, 50 bp, synthetic construct
  source 1..50: mol_type = other DNA
tccgcaaacagaatttgctttccgtttccaattcaatcatccggctgcga

SEQ ID NO: 57202 - DNA, 50 bp, synthetic construct
  source 1..50: mol_type = other DNA
acattccttggatactgtgtttccatggacggccagagtagccagcttga

SEQ ID NO: 57203 - DNA, 50 bp, synthetic construct
  source 1..50: mol_type = other DNA
cctgtattccacggaagttaatatggtcttcctgatccgtggaaacacgg

SEQ ID NO: 57204 - DNA, 50 bp, synthetic construct
  source 1..50: mol_type = other DNA
atccaagaggaaacgcaggattctctttgagtacgtcaaactgattggaa

SEQ ID NO: 57205 - DNA, 50 bp, synthetic construct
  source 1..50: mol_type = other DNA
attgcagggtttctacagatcaggaaagtgatttgcagaattgatgggga

SEQ ID NO: 57206 - DNA, 50 bp, synthetic construct
  source 1..50: mol_type = other DNA
tttcttccgtaaaaattgcgagctgaaaacatattattttacgaaaggga

SEQ ID NO: 57207 - DNA, 50 bp, synthetic construct
  source 1..50: mol_type = other DNA
gggatgtctccgggggccgggacggcggtgtgccgcgccgtggatctccc

SEQ ID NO: 57208 - DNA, 50 bp, synthetic construct
  source 1..50: mol_type = other DNA
taactatttgtttgacgtattgattttgcaatcaatgttttagatactcg

SEQ ID NO: 57209 - DNA, 50 bp, synthetic construct
  source 1..50: mol_type = other DNA
cctcactttttcaggtttttgataaatgagtgaaccaaaaaaataagaga

SEQ ID NO: 57210 - DNA, 50 bp, synthetic construct
  source 1..50: mol_type = other DNA
catatctatttctgtcaggatgccgagtgatctacacggaaacctttacc

SEQ ID NO: 57211 - DNA, 50 bp, synthetic construct
  source 1..50: mol_type = other DNA
cttgacgttggcgaggatggcgggatcgcaacatccagaccatcctcatg

SEQ ID NO: 57212 - DNA, 50 bp, synthetic construct
  source 1..50: mol_type = other DNA
ggaagggattaccacatacaacattgatgttgtatgtggttgaaaatccc

SEQ ID NO: 57213 - DNA, 50 bp, synthetic construct
  source 1..50: mol_type = other DNA
ataaatagcccctttccccaggcacccggaaaggaaaacatgaaatttat

SEQ ID NO: 57214 - DNA, 50 bp, synthetic construct
  source 1..50: mol_type = other DNA
ggcggctattcttgtggcggtcggcgcgcttgaatggggttcaagaggcc

SEQ ID NO: 57215 - DNA, 50 bp, synthetic construct
  source 1..50: mol_type = other DNA
tttttagtgataagtacgataaaatatattttggtcgttatgactactaa

SEQ ID NO: 57216 - DNA, 50 bp, synthetic construct
  source 1..50: mol_type = other DNA
tttataggctggcctcatttggctttgaagtttgtaaaggaggctatcaa

SEQ ID NO: 57217 - DNA, 50 bp, synthetic construct
  source 1..50: mol_type = other DNA
ttcttctatgtccggagagagaaatatttttatgtccgaaattaaaagag

SEQ ID NO: 57218 - DNA, 50 bp, synthetic construct
  source 1..50: mol_type = other DNA
gcgccggtgcggcctgcacctgcacgataaagacggccccggcccggagc

SEQ ID NO: 57219 - DNA, 50 bp, synthetic construct
  source 1..50: mol_type = other DNA
gggtgttgtttttgggtagtgttgtacaacgtataagaaaaccccagcaa

SEQ ID NO: 57220 - DNA, 50 bp, synthetic construct
  source 1..50: mol_type = other DNA
tctccaaggaagaagttctgtacctgcagaccgacaaccttcctcaggaa

SEQ ID NO: 57221 - DNA, 50 bp, synthetic construct
  source 1..50: mol_type = other DNA
cttttgctccagtaaattatagagatgataagaatggcaagaagcgttac

SEQ ID NO: 57222 - DNA, 50 bp, synthetic construct
  source 1..50: mol_type = other DNA
gcaggccttcaacaacagcgttacctgctcgcagattgttgacaagctgc

SEQ ID NO: 57223 - DNA, 50 bp, synthetic construct
  source 1..50: mol_type = other DNA
ggtttccgataagctctacacggaaatgcgagctatgcttatggtgaacc

SEQ ID NO: 57224 - DNA, 50 bp, synthetic construct
  source 1..50: mol_type = other DNA
aaattactgccatttttgtgtgttaaaacacataaagatggtagtaatta

SEQ ID NO: 57225 - DNA, 50 bp, synthetic construct
  source 1..50: mol_type = other DNA
cacaggtcatatatatattatcagattaaatgtaacagatatgagagctg

SEQ ID NO: 57226 - DNA, 50 bp, synthetic construct
  source 1..50: mol_type = other DNA
gtggacttaactcaaagtcgggggatcaatggagtgagaattaaaaatat

SEQ ID NO: 57227 - DNA, 50 bp, synthetic construct
  source 1..50: mol_type = other DNA
tcattttgaacgtgctggcctactacacagcacctgaacggacctaagct

SEQ ID NO: 57228 - DNA, 50 bp, synthetic construct
  source 1..50: mol_type = other DNA
cagcctgcgcagacatccgggaaagatccggcggctgcaccagcagtgca

SEQ ID NO: 57229 - DNA, 50 bp, synthetic construct
  source 1..50: mol_type = other DNA
tataagaataattcttcattttaatagtcttaagaagataacttctgtta

SEQ ID NO: 57230 - DNA, 50 bp, synthetic construct
  source 1..50: mol_type = other DNA
cccgaggcgggcgtgaccggctttaaaaagcccgcacactggcgggcggg

SEQ ID NO: 57231 - DNA, 50 bp, synthetic construct
  source 1..50: mol_type = other DNA
aagctgggcgtcaatatcccgcctgccatgaggatagccgggttcacctt

SEQ ID NO: 57232 - DNA, 50 bp, synthetic construct
  source 1..50: mol_type = other DNA
aaactacaaacaatgcaggcataatattatatagtaattgacctcttttt

SEQ ID NO: 57233 - DNA, 50 bp, synthetic construct
  source 1..50: mol_type = other DNA
acacccggatatctgcaagcggctgtcgcacccggcgttcggacaggtca

SEQ ID NO: 57234 - DNA, 50 bp, synthetic construct
  source 1..50: mol_type = other DNA
cagacagaagacggtctgaccaagataatgcccactaatgcttgataata

SEQ ID NO: 57235 - DNA, 50 bp, synthetic construct
  source 1..50: mol_type = other DNA
tctcgctcggcatcgtgctcacctgcaggtgatcacttcctcctgctggg

SEQ ID NO: 57236 - DNA, 50 bp, synthetic construct
  source 1..50: mol_type = other DNA
tataagctctgctccatctgctttgataaaatgaaacccaggagctatgc

SEQ ID NO: 57237 - DNA, 50 bp, synthetic construct
  source 1..50: mol_type = other DNA
agttttaaaaacagctgtgagaatgagcaggcagacgaagttttttgatg

SEQ ID NO: 57238 - DNA, 50 bp, synthetic construct
  source 1..50: mol_type = other DNA
gaagatttttttgaatattttagaaatctaagatagaaaaacatctgtct

SEQ ID NO: 57239 - DNA, 50 bp, synthetic construct
  source 1..50: mol_type = other DNA
gctttttaccaacaaggataccacatgcgctctgtgttttggtcacaaag

SEQ ID NO: 57240 - DNA, 50 bp, synthetic construct
  source 1..50: mol_type = other DNA
atttacgcatgcataaaccgcattcggcttatctttgtgcagcatatatc

SEQ ID NO: 57241 - DNA, 50 bp, synthetic construct
  source 1..50: mol_type = other DNA
aaaacgcaaggttgcattgaccctaacatttcaatctgattcagcgtttc

SEQ ID NO: 57242 - DNA, 50 bp, synthetic construct
  source 1..50: mol_type = other DNA
catcacatcgaagattcattgtcatgtcacaaaattcacacgaaaggagc

SEQ ID NO: 57243 - DNA, 50 bp, synthetic construct
  source 1..50: mol_type = other DNA
gcaaaggtaataataatttccgaatggtcattgattattatgtcgtttat

SEQ ID NO: 57244 - DNA, 50 bp, synthetic construct
  source 1..50: mol_type = other DNA
accatcgcggccacggagtccagtgcaatgggctatgtggtgaagaaggc

SEQ ID NO: 57245 - DNA, 50 bp, synthetic construct
  source 1..50: mol_type = other DNA
tggccaaatccgtaaccacaataccggtacggtgaaaacggatgcctcca

SEQ ID NO: 57246 - DNA, 50 bp, synthetic construct
  source 1..50: mol_type = other DNA
agcctcggccatggctgtacctcctggggatcggcgccatgacggacttc

SEQ ID NO: 57247 - DNA, 50 bp, synthetic construct
  source 1..50: mol_type = other DNA
tgatttctgcggctttcaatggtataatgtttctatgtcagcagcaataa

SEQ ID NO: 57248 - DNA, 50 bp, synthetic construct
  source 1..50: mol_type = other DNA
gctattatatctgttttatcatgcggaggcgaacccatggatagaattat

SEQ ID NO: 57249 - DNA, 50 bp, synthetic construct
  source 1..50: mol_type = other DNA
cgacaccctgatgcttcacggcatcgatgagatggatccccagagagagg

SEQ ID NO: 57250 - DNA, 50 bp, synthetic construct
  source 1..50: mol_type = other DNA
acttagttagacgtaacctgacgcatgctgacggttgcgtccatctaagt

SEQ ID NO: 57251 - DNA, 50 bp, synthetic construct
  source 1..50: mol_type = other DNA
aagagttaatttcaactagatattaaaatatttagaataaaaataaaata

SEQ ID NO: 57252 - DNA, 50 bp, synthetic construct
  source 1..50: mol_type = other DNA
tctctcccctttcttttaaaacagtcttttgtacccaaaagggagaggga

SEQ ID NO: 57253 - DNA, 50 bp, synthetic construct
  source 1..50: mol_type = other DNA
tggcataaattcctcctatcatgaattcatgtcccataaagacaatggcc

SEQ ID NO: 57254 - DNA, 50 bp, synthetic construct
  source 1..50: mol_type = other DNA
ttaggtttttgtgttataatgtggttcgattgtatgtgaatcaagtgtgg

SEQ ID NO: 57255 - DNA, 50 bp, synthetic construct
  source 1..50: mol_type = other DNA
atatttttttgcttgtgaaagcgttattcctttcaaaacaaataaaaacg

SEQ ID NO: 57256 - DNA, 50 bp, synthetic construct
  source 1..50: mol_type = other DNA
ccaccggctcgacgtcgtcctgctggcgcaggacgcagcggaggatggcg

SEQ ID NO: 57257 - DNA, 50 bp, synthetic construct
  source 1..50: mol_type = other DNA
gaaatcgtatcggaaacctttctccggcgtcaggcttctggccgcccccg

SEQ ID NO: 57258 - DNA, 50 bp, synthetic construct
  source 1..50: mol_type = other DNA
ggcgcgctccacctttttatcgatgaacttagaagaaggtgataataatg

SEQ ID NO: 57259 - DNA, 50 bp, synthetic construct
  source 1..50: mol_type = other DNA
tgtatgtttaagtaataagcggcgattgaacgttattatataataattcc

SEQ ID NO: 57260 - DNA, 50 bp, synthetic construct
  source 1..50: mol_type = other DNA
tcgggagtaataaaaacattggttctttatacttgccttatagttcccat

SEQ ID NO: 57261 - DNA, 50 bp, synthetic construct
  source 1..50: mol_type = other DNA
gaattatatcaaatgatgtttggaattcaaaacaaaagcaaacataatgg

SEQ ID NO: 57262 - DNA, 50 bp, synthetic construct
  source 1..50: mol_type = other DNA
taaaaaaaatcatgaatgcgacaaaatgggtgggacaaatttttttacgc

SEQ ID NO: 57263 - DNA, 50 bp, synthetic construct
  source 1..50: mol_type = other DNA
tcaaggaatgactataattgaaaagattggaaattaaaacaaaaagcaag

SEQ ID NO: 57264 - DNA, 50 bp, synthetic construct
  source 1..50: mol_type = other DNA
aatacaccctttcaagcgagtccttaaagagcggtgcgatagggattatt

SEQ ID NO: 57265 - DNA, 50 bp, synthetic construct
  source 1..50: mol_type = other DNA
tatatcaaaaagaaaatgttaaccaactttcttattcaaatttttatatc

SEQ ID NO: 57266 - DNA, 50 bp, synthetic construct
  source 1..50: mol_type = other DNA
tcatatggttgctcccctgttctctcgttgccagtcctccccggatatgc

SEQ ID NO: 57267 - DNA, 50 bp, synthetic construct
  source 1..50: mol_type = other DNA
tgttatactaactaaacatatcccacgggtagtgtctagttaatacaaca

SEQ ID NO: 57268 - DNA, 50 bp, synthetic construct
  source 1..50: mol_type = other DNA
aatttgcaccccttttggaagatgcccttttttagaaaggggttttatta

SEQ ID NO: 57269 - DNA, 50 bp, synthetic construct
  source 1..50: mol_type = other DNA
ttaccacaagatcatatttttcttttcaaaaatccatcatcttatggtat

SEQ ID NO: 57270 - DNA, 50 bp, synthetic construct
  source 1..50: mol_type = other DNA
tcttcaacatattcatcattcaaattcctattcgattgtgaggctgaacc

SEQ ID NO: 57271 - DNA, 50 bp, synthetic construct
  source 1..50: mol_type = other DNA
caagttcttttattaattcgcgaaacttttaaaagtaataatttcaactg

SEQ ID NO: 57272 - DNA, 50 bp, synthetic construct
  source 1..50: mol_type = other DNA
ttgccgcgtttatcttatccgccgcgtgatagataattatgcagaaagaa

SEQ ID NO: 57273 - DNA, 50 bp, synthetic construct
  source 1..50: mol_type = other DNA
aaaaggaagccttttcagacttcctttttattttgaaaatcctttctttt

SEQ ID NO: 57274 - DNA, 50 bp, synthetic construct
  source 1..50: mol_type = other DNA
gtccctgaatatggaaataaatagggaaggttatttttatattcacggac

SEQ ID NO: 57275 - DNA, 50 bp, synthetic construct
  source 1..50: mol_type = other DNA
ttcccgaatttatcccgaattgtaacaatgaaaacagaaaaaggcgggaa

SEQ ID NO: 57276 - DNA, 50 bp, synthetic construct
  source 1..50: mol_type = other DNA
cccggagatagtgaagctctggaacatgcctggaggtccttataggtggc

SEQ ID NO: 57277 - DNA, 50 bp, synthetic construct
  source 1..50: mol_type = other DNA
agtactttcaatgaattattttttaaaaaaaatttttggcagaacaaaac

SEQ ID NO: 57278 - DNA, 50 bp, synthetic construct
  source 1..50: mol_type = other DNA
tgaggtgctggcggatttgttccaggcggccgatggtggccagcaccgcg

SEQ ID NO: 57279 - DNA, 50 bp, synthetic construct
  source 1..50: mol_type = other DNA
gttgtccggtgcgggattacacccgcgggtgtgggccggcaccggcttcg

SEQ ID NO: 57280 - DNA, 50 bp, synthetic construct
  source 1..50: mol_type = other DNA
tatcacctccttgtcagtgtcacatattatgtctgccaatggagtgaatg

SEQ ID NO: 57281 - DNA, 50 bp, synthetic construct
  source 1..50: mol_type = other DNA
ctggcggtcccggcggtgcggtcatgtaggcgctgcctcgggagttgacc

SEQ ID NO: 57282 - DNA, 50 bp, synthetic construct
  source 1..50: mol_type = other DNA
cgctctatccagctgagctacgggcggctcctggtcgggcggatagagcg

SEQ ID NO: 57283 - DNA, 50 bp, synthetic construct
  source 1..50: mol_type = other DNA
caacaaggaggaacgatcatgagcaagcccatcgcagttggtcgaagggc

SEQ ID NO: 57284 - DNA, 50 bp, synthetic construct
  source 1..50: mol_type = other DNA
cgcgggaggtgcgggcgcattgaggcccgcatgcgcatgtcgacggcgcc

SEQ ID NO: 57285 - DNA, 50 bp, synthetic construct
  source 1..50: mol_type = other DNA
acatttaatagaattatcactgcaaatacagtttgctttcctttgaatgt

SEQ ID NO: 57286 - DNA, 50 bp, synthetic construct
  source 1..50: mol_type = other DNA
tataaaggtctgcaattttcatagctggctgaaaaacttttgacaacaat

SEQ ID NO: 57287 - DNA, 50 bp, synthetic construct
  source 1..50: mol_type = other DNA
ttttgaacaggcgcaaaaataggataaccgtgacaccagcaggaacaagg

SEQ ID NO: 57288 - DNA, 50 bp, synthetic construct
  source 1..50: mol_type = other DNA
catgacggtcccccagaagccccgcgacgttcttccgcatgacgttcagg

SEQ ID NO: 57289 - DNA, 50 bp, synthetic construct
  source 1..50: mol_type = other DNA
gactttctgtcccgattgcggggcgggcggcgctatcgagacgatgagct

SEQ ID NO: 57290 - DNA, 50 bp, synthetic construct
  source 1..50: mol_type = other DNA
cgcgcggcgggcgccggttgaggcggccatattcgaaggcccattgcgcg

SEQ ID NO: 57291 - DNA, 50 bp, synthetic construct
  source 1..50: mol_type = other DNA
cgatgggcggggtcgggtcgatcgcgggtgaggggtgtctccgtggcgcg

SEQ ID NO: 57292 - DNA, 50 bp, synthetic construct
  source 1..50: mol_type = other DNA
gcaatgtcccgcgccaccgccgcgcgcgcggcccatgggcaggaacgcgt

SEQ ID NO: 57293 - DNA, 50 bp, synthetic construct
  source 1..50: mol_type = other DNA
gttaccacctagatgtactactgctatcatcactacaaggaggtggtttc

SEQ ID NO: 57294 - DNA, 50 bp, synthetic construct
  source 1..50: mol_type = other DNA
tcatcctttttttgttaattttcatttaaagcttatggaaaggaggaatg

SEQ ID NO: 57295 - DNA, 50 bp, synthetic construct
  source 1..50: mol_type = other DNA
ccactctgaaagtcaggatacaccatgcacaatgtcgacagcaagagcgg

SEQ ID NO: 57296 - DNA, 50 bp, synthetic construct
  source 1..50: mol_type = other DNA
aattaatatgccaattgtttactaaaaattaaacaaaaattatatcccac

SEQ ID NO: 57297 - DNA, 50 bp, synthetic construct
  source 1..50: mol_type = other DNA
ttcttatattgcgcaatatttaaagctttttctgtgcgaagataaaagcc

SEQ ID NO: 57298 - DNA, 50 bp, synthetic construct
  source 1..50: mol_type = other DNA
tcacctattatataacacaggatatatcttgctgttcatataataatgag

SEQ ID NO: 57299 - DNA, 50 bp, synthetic construct
  source 1..50: mol_type = other DNA
tcaaggctgctggaattactgcttataagcccgaagacaaaaaggtattt

SEQ ID NO: 57300 - DNA, 50 bp, synthetic construct
  source 1..50: mol_type = other DNA
aaataagcccttcaaaattccgggggtatggatattcgaacgctcatttg

SEQ ID NO: 57301 - DNA, 50 bp, synthetic construct
  source 1..50: mol_type = other DNA
gcagcctttacctaccataacgaccggttaatatgaaaggaaaatcaatg

SEQ ID NO: 57302 - DNA, 50 bp, synthetic construct
  source 1..50: mol_type = other DNA
accgctgctttgttccgaactggctaataaggaatgggaaaagcgaggac

SEQ ID NO: 57303 - DNA, 50 bp, synthetic construct
  source 1..50: mol_type = other DNA
ccgcatatgctgcttgcgctgctctggtgctgcgattgcagcttatgcac

SEQ ID NO: 57304 - DNA, 50 bp, synthetic construct
  source 1..50: mol_type = other DNA
catgaaaatcactcctttccgacacttgtgggaaaacccggtgaatcacc

SEQ ID NO: 57305 - DNA, 50 bp, synthetic construct
  source 1..50: mol_type = other DNA
ttcgatgaaagatattccggcggcgttgccggagcataaatcccatctgc

SEQ ID NO: 57306 - DNA, 50 bp, synthetic construct
  source 1..50: mol_type = other DNA
tagattatgctcacattcgccacttccttgtcttcaatgagcatattcgc

SEQ ID NO: 57307 - DNA, 50 bp, synthetic construct
  source 1..50: mol_type = other DNA
ttaccatagaccccaaactatatccatatattccgcagttaaccaagtgc

SEQ ID NO: 57308 - DNA, 50 bp, synthetic construct
  source 1..50: mol_type = other DNA
aaacggcaaagcagttattgatgaagctttcaaaagcggcgctgcaaagg

SEQ ID NO: 57309 - DNA, 50 bp, synthetic construct
  source 1..50: mol_type = other DNA
ttgaaattctcgcagaaattaataaaaggcaccctacgttataattcgta

SEQ ID NO: 57310 - DNA, 50 bp, synthetic construct
  source 1..50: mol_type = other DNA
tgcatgccttcctcctatttcccccggaggccctgttcttaagtcattta

SEQ ID NO: 57311 - DNA, 50 bp, synthetic construct
  source 1..50: mol_type = other DNA
tcagttcggtcagttcactgtattgaaacccaatgaaccttgaaaacttc

SEQ ID NO: 57312 - DNA, 50 bp, synthetic construct
  source 1..50: mol_type = other DNA
cagccctggagtatgctcagaaagtactgccggaatttacgccggtcacg

SEQ ID NO: 57313 - DNA, 50 bp, synthetic construct
  source 1..50: mol_type = other DNA
gaagcaaatatccgcgcttcacgtcgataaaaagggcggggcaaattttt

SEQ ID NO: 57314 - DNA, 50 bp, synthetic construct
  source 1..50: mol_type = other DNA
tttttcgttgattaagacagaagaaaatgaaaaagatgatcgacgaatta

SEQ ID NO: 57315 - DNA, 50 bp, synthetic construct
  source 1..50: mol_type = other DNA
catcgctaagcttaagtgtaaggtaagtccggcggttatatttgctgatg

SEQ ID NO: 57316 - DNA, 50 bp, synthetic construct
  source 1..50: mol_type = other DNA
ttataaagtaatcagcccgtgggggtaccctcctcgggatcactttatac

SEQ ID NO: 57317 - DNA, 50 bp, synthetic construct
  source 1..50: mol_type = other DNA
caacaatactacataatttttataatttgaaaaatcgacggcattttttg

SEQ ID NO: 57318 - DNA, 50 bp, synthetic construct
  source 1..50: mol_type = other DNA
gccgagtacgtcttcgtctttccagtgcgtaaaccgaagaaacactccaa

SEQ ID NO: 57319 - DNA, 50 bp, synthetic construct
  source 1..50: mol_type = other DNA
caaaaagaaactggacacccacttcgaggaatttggaatatcttcgtgta

SEQ ID NO: 57320 - DNA, 50 bp, synthetic construct
  source 1..50: mol_type = other DNA
tggctcaaaatgcacaccccacagacgaatggagaaagcattatgagaga

SEQ ID NO: 57321 - DNA, 50 bp, synthetic construct
  source 1..50: mol_type = other DNA
cgacgtgaagattacaaccgtaattctttattatttatatctccaccgaa

SEQ ID NO: 57322 - DNA, 50 bp, synthetic construct
  source 1..50: mol_type = other DNA
tttctttttggcaaaaatgttccaagaggaatggcgatttcatcctcttc

SEQ ID NO: 57323 - DNA, 50 bp, synthetic construct
  source 1..50: mol_type = other DNA
gagcaagacgatactgcgtttcactcggtaaacgcggcgttcccctgcca

SEQ ID NO: 57324 - DNA, 50 bp, synthetic construct
  source 1..50: mol_type = other DNA
attagggcttttttacgtctctatcgatagacattaaaaaaagcctcact

SEQ ID NO: 57325 - DNA, 50 bp, synthetic construct
  source 1..50: mol_type = other DNA
agaaaacaaatacctgtctccataataggttttatttttatacctttttt

SEQ ID NO: 57326 - DNA, 50 bp, synthetic construct
  source 1..50: mol_type = other DNA
ttttgtactaacttaacacagcccacgggtagtgtcacattagtacaaca

SEQ ID NO: 57327 - DNA, 50 bp, synthetic construct
  source 1..50: mol_type = other DNA
tgatctatattttcgggagtcaattctgagatttcacaaaattaattaaa

SEQ ID NO: 57328 - DNA, 50 bp, synthetic construct
  source 1..50: mol_type = other DNA
gaaatgtccttggacttcgatgaggaaaaatgtcagaggttttacgattg

SEQ ID NO: 57329 - DNA, 50 bp, synthetic construct
  source 1..50: mol_type = other DNA
tgacgtcagcaaaatccacatgataaatccaactgcaagggctgacatct

SEQ ID NO: 57330 - DNA, 50 bp, synthetic construct
  source 1..50: mol_type = other DNA
attcttttactgtcttttccgatttttatgcaaaaaacagataaactacc

SEQ ID NO: 57331 - DNA, 50 bp, synthetic construct
  source 1..50: mol_type = other DNA
ggggtaaagataccagaggactcttaaccagcactttctgtattttcccc

SEQ ID NO: 57332 - DNA, 50 bp, synthetic construct
  source 1..50: mol_type = other DNA
ccccgaagcggtcttttttcatcttacgttgataaacatagacttcattt

SEQ ID NO: 57333 - DNA, 50 bp, synthetic construct
  source 1..50: mol_type = other DNA
tctggcatacacaatctgccgtatctatgcaggatgagctgtttgccaga

SEQ ID NO: 57334 - DNA, 50 bp, synthetic construct
  source 1..50: mol_type = other DNA
tgtgcttgtcctcaatgctcttgtagacaagtttattgtatcatagctcc

SEQ ID NO: 57335 - DNA, 50 bp, synthetic construct
  source 1..50: mol_type = other DNA
ctgttcatcgtaccacctccataattttatggaggaaaacgacaatgagt

SEQ ID NO: 57336 - DNA, 50 bp, synthetic construct
  source 1..50: mol_type = other DNA
gagtatgcgctgaccgcaagtacagctgtgaagcgggtcagcgtagccgg

SEQ ID NO: 57337 - DNA, 50 bp, synthetic construct
  source 1..50: mol_type = other DNA
ttttcggcatggcgttccctccatttcaaatcagaaaaaatatttgaaaa

SEQ ID NO: 57338 - DNA, 50 bp, synthetic construct
  source 1..50: mol_type = other DNA
cgatggcttcagtatatcttcaagtgctgcaagaaaggaggaaagcatga

SEQ ID NO: 57339 - DNA, 50 bp, synthetic construct
  source 1..50: mol_type = other DNA
agtcattcagggcataatccgagccattagagtcctatcggcaaaagacg

SEQ ID NO: 57340 - DNA, 50 bp, synthetic construct
  source 1..50: mol_type = other DNA
cggcggtttgcatattttttatcacttgtcgataaatatgaaaaaaacag

SEQ ID NO: 57341 - DNA, 50 bp, synthetic construct
  source 1..50: mol_type = other DNA
accctcctaaaaatttcgtcgttatgtaaacgcgaggtgcttgcctttga

SEQ ID NO: 57342 - DNA, 50 bp, synthetic construct
  source 1..50: mol_type = other DNA
ggacggttctgcatattcttctttgagtggaagaatttggagattcagat

SEQ ID NO: 57343 - DNA, 50 bp, synthetic construct
  source 1..50: mol_type = other DNA
tgaaatcgtttttatcatagcgaattttgtatagaataaaacagattttc

SEQ ID NO: 57344 - DNA, 50 bp, synthetic construct
  source 1..50: mol_type = other DNA
atcggaaaggcacatgtgacaaaaagtttacgagtaggtgattgcatgaa

SEQ ID NO: 57345 - DNA, 50 bp, synthetic construct
  source 1..50: mol_type = other DNA
gcttgcatattttgtggattttcgtaaaacagtccttaaaaactgcgctt

SEQ ID NO: 57346 - DNA, 50 bp, synthetic construct
  source 1..50: mol_type = other DNA
atgaacgcacctgaaactgcactcgatgtttaagcctcaaatgcagacat

SEQ ID NO: 57347 - DNA, 50 bp, synthetic construct
  source 1..50: mol_type = other DNA
gaatataatatcacttttgcgcagcaaaccgcaaaaaaaatcttataatc

SEQ ID NO: 57348 - DNA, 50 bp, synthetic construct
  source 1..50: mol_type = other DNA
ccggagtggagcaagcccatctgaatacttagtggttttctccactcatt

SEQ ID NO: 57349 - DNA, 50 bp, synthetic construct
  source 1..50: mol_type = other DNA
aatgtacccaataatggccggtacttgaaaaagcatttagagtatttaaa

SEQ ID NO: 57350 - DNA, 50 bp, synthetic construct
  source 1..50: mol_type = other DNA
cccggattttacagcccgtgagtttagaaagatgggctgtaaatccgtgg

SEQ ID NO: 57351 - DNA, 50 bp, synthetic construct
  source 1..50: mol_type = other DNA
ttttgatttctccccatccctttatataaaggcaagccttgaaaccatgc

SEQ ID NO: 57352 - DNA, 50 bp, synthetic construct
  source 1..50: mol_type = other DNA
cctccttatttcgtctctcgttttataaaaaaaggagcgctatcgggcgc

SEQ ID NO: 57353 - DNA, 50 bp, synthetic construct
  source 1..50: mol_type = other DNA
actcatatattaaatatcgtcccgaaaggagcttacataaaaagatgcgg

SEQ ID NO: 57354 - DNA, 50 bp, synthetic construct
  source 1..50: mol_type = other DNA
cctccgacattaacctgagcccgaattaaggtacaggttttaataacaat

SEQ ID NO: 57355 - DNA, 50 bp, synthetic construct
  source 1..50: mol_type = other DNA
tcgattttctctactgttttcaatgaattgatagaattagtaaaaaaatc

SEQ ID NO: 57356 - DNA, 50 bp, synthetic construct
  source 1..50: mol_type = other DNA
gttctttcattgtacaaggggcaaatcgtattcttggtgattgagagaac

SEQ ID NO: 57357 - DNA, 50 bp, synthetic construct
  source 1..50: mol_type = other DNA
cgttcggagcgttaaattcgcaaacgtttgaaaacggaactcgccagaaa

SEQ ID NO: 57358 - DNA, 50 bp, synthetic construct
  source 1..50: mol_type = other DNA
taatggcgaaagcagtaagggcggtgatgccctgtgccagaaaacagtta

SEQ ID NO: 57359 - DNA, 50 bp, synthetic construct
  source 1..50: mol_type = other DNA
ggcttttcacatagattgttgatgatcacaagccgatcatcgaaaaagcc

SEQ ID NO: 57360 - DNA, 50 bp, synthetic construct
  source 1..50: mol_type = other DNA
gaatgagaaaagttatggcgcaggcagatgcgtcaaggaatttacagtcg

SEQ ID NO: 57361 - DNA, 50 bp, synthetic construct
  source 1..50: mol_type = other DNA
ttagcggcgtttcacccgccggtcggaaacagcacacgtaaatcctctaa

SEQ ID NO: 57362 - DNA, 50 bp, synthetic construct
  source 1..50: mol_type = other DNA
gatgagatatatgatacttgaattaaagcaaaagtttcaatcttctctct

SEQ ID NO: 57363 - DNA, 50 bp, synthetic construct
  source 1..50: mol_type = other DNA
cttgcgcacaatccgcacattgtcatacgtttgacgattttcgcctcttc

SEQ ID NO: 57364 - DNA, 50 bp, synthetic construct
  source 1..50: mol_type = other DNA
tcctttttcgggatattccataggaaaacggcgaaaagcccgaaaaataa

SEQ ID NO: 57365 - DNA, 50 bp, synthetic construct
  source 1..50: mol_type = other DNA
aattatagacgaacctgctgccgcaagcggcagggatttctctgctgcct

SEQ ID NO: 57366 - DNA, 50 bp, synthetic construct
  source 1..50: mol_type = other DNA
catttttccatcatcaaccatatttaaaggatgctcacagccaaaaaaga

SEQ ID NO: 57367 - DNA, 50 bp, synthetic construct
  source 1..50: mol_type = other DNA
taacatcatatccaagggttaggagctataaggcctgttatataatcaat

SEQ ID NO: 57368 - DNA, 50 bp, synthetic construct
  source 1..50: mol_type = other DNA
aaaaatttcttcatttttctttttccataaagatttgtggtatcattgtt

SEQ ID NO: 57369 - DNA, 50 bp, synthetic construct
  source 1..50: mol_type = other DNA
ccacaactgcgatagcaattcctgcaacggagtacacatcaaaaatatca

SEQ ID NO: 57370 - DNA, 50 bp, synthetic construct
  source 1..50: mol_type = other DNA
cagaaagtaaagtaaattaacggtttcatcaggacgcactttcctttgaa

SEQ ID NO: 57371 - DNA, 50 bp, synthetic construct
  source 1..50: mol_type = other DNA
ttttgccatgttccatatctctccttttggggatatagctcagttggtag

SEQ ID NO: 57372 - DNA, 50 bp, synthetic construct
  source 1..50: mol_type = other DNA
tgaacttatctaaaagaagcgggccgtccccggcgcctttaccgtatttc

SEQ ID NO: 57373 - DNA, 50 bp, synthetic construct
  source 1..50: mol_type = other DNA
gcggagatcgcggcggcgtccggcgggcaggacggggcagcaggacgcgc

SEQ ID NO: 57374 - DNA, 50 bp, synthetic construct
  source 1..50: mol_type = other DNA
ctactttatttgccatattgatttaaaattcaatttttaaagtaaaatat

SEQ ID NO: 57375 - DNA, 50 bp, synthetic construct
  source 1..50: mol_type = other DNA
acctcctcctgtcattacatatatcgatataaaacatctaatctcattag

SEQ ID NO: 57376 - DNA, 50 bp, synthetic construct
  source 1..50: mol_type = other DNA
tagaagttaagttttgatatgataaatttggtatcaaaaatgtcagttta

SEQ ID NO: 57377 - DNA, 50 bp, synthetic construct
  source 1..50: mol_type = other DNA
aaaaagattgactttggaaggaaataataccttcaaaactgaatcctgtt

SEQ ID NO: 57378 - DNA, 50 bp, synthetic construct
  source 1..50: mol_type = other DNA
tgcgcccagcaggagggctttttcgcgctaaagcgcccactctgcgcgca

SEQ ID NO: 57379 - DNA, 50 bp, synthetic construct
  source 1..50: mol_type = other DNA
cgtcaaacggcattgtaaagcgctggcgctgctgcatatcacgcttactg

SEQ ID NO: 57380 - DNA, 50 bp, synthetic construct
  source 1..50: mol_type = other DNA
tcggaagcccagctgaccagttcatcgtattttatcagcctcgtcctcgt

SEQ ID NO: 57381 - DNA, 50 bp, synthetic construct
  source 1..50: mol_type = other DNA
cttacacaattatctatcatcctgtacaggagtataagcctgaaacttta

SEQ ID NO: 57382 - DNA, 50 bp, synthetic construct
  source 1..50: mol_type = other DNA
ccccaattcttgctatttcgttgcttttgaagaagataatcgtgaggtga

SEQ ID NO: 57383 - DNA, 50 bp, synthetic construct
  source 1..50: mol_type = other DNA
atcagcagatgtaagcttattgatctaatccaaagcttattcttgctgat

SEQ ID NO: 57384 - DNA, 50 bp, synthetic construct
  source 1..50: mol_type = other DNA
ctgaatataaatatcttttttgatttgcttcaaaagatatgtgcagataa

SEQ ID NO: 57385 - DNA, 50 bp, synthetic construct
  source 1..50: mol_type = other DNA
tgttttcttggatacctttcacctttaccttgcgtaagaaaaagaaaaca

SEQ ID NO: 57386 - DNA, 50 bp, synthetic construct
  source 1..50: mol_type = other DNA
acagtgaccgaatcaaagatgtgttcacagaatagcgattcgcaccctct

SEQ ID NO: 57387 - DNA, 50 bp, synthetic construct
  source 1..50: mol_type = other DNA
cgattcaaacggtgaaattaaaattggttttaccccccccccgatttccg

SEQ ID NO: 57388 - DNA, 50 bp, synthetic construct
  source 1..50: mol_type = other DNA
tcccggagctgcttcgtaattatagatgaaattcttcacaatttgagggt

SEQ ID NO: 57389 - DNA, 50 bp, synthetic construct
  source 1..50: mol_type = other DNA
cgtgttatgtttctcagattggaggtaccgtccatatcaaaaataacgct

SEQ ID NO: 57390 - DNA, 50 bp, synthetic construct
  source 1..50: mol_type = other DNA
tgagcaggatcatggtacaatgaaattttgaaatttgatgatactgcgta

SEQ ID NO: 57391 - DNA, 50 bp, synthetic construct
  source 1..50: mol_type = other DNA
taaaaccttatagctcatcgtctcgactttccttgaaaaaggtaacgaaa

SEQ ID NO: 57392 - DNA, 50 bp, synthetic construct
  source 1..50: mol_type = other DNA
ccaaggtaaataatttgaaataaaatcggatttctgtttatttttctcta

SEQ ID NO: 57393 - DNA, 50 bp, synthetic construct
  source 1..50: mol_type = other DNA
tactacatataaatagtatatggtatatagcaaagtatttataggtagta

SEQ ID NO: 57394 - DNA, 50 bp, synthetic construct
  source 1..50: mol_type = other DNA
gaactgaatgaattgttaaatgcggcagccacgcaagagaacaaaagttc

SEQ ID NO: 57395 - DNA, 50 bp, synthetic construct
  source 1..50: mol_type = other DNA
caaaggacgcaaacagcggcacggaaacggcggaagccgtaaagcctccg

SEQ ID NO: 57396 - DNA, 50 bp, synthetic construct
  source 1..50: mol_type = other DNA
gaatgggaaagactagaaagaaagccttttattttacactttttcgtgta

SEQ ID NO: 57397 - DNA, 50 bp, synthetic construct
  source 1..50: mol_type = other DNA
attacggctatcattgaaattccgggaggaatttcattgaaaacagtaga

SEQ ID NO: 57398 - DNA, 50 bp, synthetic construct
  source 1..50: mol_type = other DNA
ctttccaataatgattctgcctcagaaatggccaaatccgtaaccacaat

SEQ ID NO: 57399 - DNA, 50 bp, synthetic construct
  source 1..50: mol_type = other DNA
ttagcttttttatcctttaaatttaataatgaaaaaaatagtaaaggata

SEQ ID NO: 57400 - DNA, 50 bp, synthetic construct
  source 1..50: mol_type = other DNA
aggcattaaagattagagtcattaatcaatgaaaaaaatagtttatgaat

SEQ ID NO: 57401 - DNA, 50 bp, synthetic construct
  source 1..50: mol_type = other DNA
cacattctatcctttcactggttaattaacatataaagaaaaagaatgtg

SEQ ID NO: 57402 - DNA, 50 bp, synthetic construct
  source 1..50: mol_type = other DNA
taaaataagtacatcagaagctttggaaagcatatttcagccttttttcc

SEQ ID NO: 57403 - DNA, 50 bp, synthetic construct
  source 1..50: mol_type = other DNA
tttgacatccagtgtctgatcgaaattttataaagacacatcttgtcgat

SEQ ID NO: 57404 - DNA, 50 bp, synthetic construct
  source 1..50: mol_type = other DNA
atcatcagccgcgatatgtgctgcatccggctgtaatccttgctgatgag

SEQ ID NO: 57405 - DNA, 50 bp, synthetic construct
  source 1..50: mol_type = other DNA
catttattttcaggtaagcaaaaagcggataattcccctgacaataaaaa

SEQ ID NO: 57406 - DNA, 50 bp, synthetic construct
  source 1..50: mol_type = other DNA
cgtaatggacaagcacctcgcccatatgtttattgtgtttgtgtttaatt

SEQ ID NO: 57407 - DNA, 50 bp, synthetic construct
  source 1..50: mol_type = other DNA
ttttttctgcacgagattacgctgatcctgttcaccttggagtgaaagaa

SEQ ID NO: 57408 - DNA, 50 bp, synthetic construct
  source 1..50: mol_type = other DNA
ttcaaaactatttatttcaaaaatatttttttcatttattttaccattat

SEQ ID NO: 57409 - DNA, 50 bp, synthetic construct
  source 1..50: mol_type = other DNA
ctgtaagcacgtaaacatgggcactctatcattggttagcttgcttatag

SEQ ID NO: 57410 - DNA, 50 bp, synthetic construct
  source 1..50: mol_type = other DNA
agacattcaaggacgtcgagagtatctcaaacggaggtcttcttatgtct

SEQ ID NO: 57411 - DNA, 50 bp, synthetic construct
  source 1..50: mol_type = other DNA
tggcttctgggcttttctaatattttacaatgtaaatggcacaggattta

SEQ ID NO: 57412 - DNA, 50 bp, synthetic construct
  source 1..50: mol_type = other DNA
gcttaccatatagccaaacattgtatctggctgttgtcccggaggtatct

SEQ ID NO: 57413 - DNA, 50 bp, synthetic construct
  source 1..50: mol_type = other DNA
ggtaatttttttgtgaccggcataaataatccggtcacattctgattttt

SEQ ID NO: 57414 - DNA, 50 bp, synthetic construct
  source 1..50: mol_type = other DNA
ctctttgctgctgtccaccagataattgtggtgatattatgagaaacaag

SEQ ID NO: 57415 - DNA, 50 bp, synthetic construct
  source 1..50: mol_type = other DNA
cttttccggaattatcttgcaggtatttctgcaacggaacctttgaaggg

SEQ ID NO: 57416 - DNA, 50 bp, synthetic construct
  source 1..50: mol_type = other DNA
ttttgacacatgatacgctggcggcatgcccagcgccatggcagtaagta

SEQ ID NO: 57417 - DNA, 50 bp, synthetic construct
  source 1..50: mol_type = other DNA
tagccttaataaacataatcacagccttctacaacatcttcataagtctc

SEQ ID NO: 57418 - DNA, 50 bp, synthetic construct
  source 1..50: mol_type = other DNA
ataaaatccatgtagcatcaacaaaatccgctatgctccaccatttttat

SEQ ID NO: 57419 - DNA, 50 bp, synthetic construct
  source 1..50: mol_type = other DNA
aagaaaggcatttaattttatacccaggaaacctgacccttgccattctt

SEQ ID NO: 57420 - DNA, 50 bp, synthetic construct
  source 1..50: mol_type = other DNA
ataagtacatcagaagctttggcagtacccaactgccggttgaagctgat

SEQ ID NO: 57421 - DNA, 50 bp, synthetic construct
  source 1..50: mol_type = other DNA
ataatccgaaccttttgccgattggtcacgcagaccgtcgttccgtttat

SEQ ID NO: 57422 - DNA, 50 bp, synthetic construct
  source 1..50: mol_type = other DNA
ggaaaatattttgtggatgctgtggccactttatacacaaaattaaagta

SEQ ID NO: 57423 - DNA, 50 bp, synthetic construct
  source 1..50: mol_type = other DNA
cagcagcacggtcggtcacagtcatttttatattaccgaccgccggtaca

SEQ ID NO: 57424 - DNA, 50 bp, synthetic construct
  source 1..50: mol_type = other DNA
cgggcattgcattcttcccgtagtagacaaaagcaatttgtcaatgcgaa

SEQ ID NO: 57425 - DNA, 50 bp, synthetic construct
  source 1..50: mol_type = other DNA
ggtaagcccgaaagacggcaacggttttgttgccgggttgacggttgccg

SEQ ID NO: 57426 - DNA, 50 bp, synthetic construct
  source 1..50: mol_type = other DNA
caaaaccgccgaataagaaaaaagtcacattttcttatttgacgggctca

SEQ ID NO: 57427 - DNA, 50 bp, synthetic construct
  source 1..50: mol_type = other DNA
ttacaaaattagcatagcgtcgccaaagcccctgcatggggcttttcgct

SEQ ID NO: 57428 - DNA, 50 bp, synthetic construct
  source 1..50: mol_type = other DNA
tttgttatattttagaaagaggtatatgaaattatctataaagacactgg

SEQ ID NO: 57429 - DNA, 50 bp, synthetic construct
  source 1..50: mol_type = other DNA
ctggcccatctggcgcgggtacgacttcggtcacgccttttcttttgctt

SEQ ID NO: 57430 - DNA, 50 bp, synthetic construct
  source 1..50: mol_type = other DNA
aatcgctaaaaagctgttctcttccggaaaggagctaattttatgcgaaa

SEQ ID NO: 57431 - DNA, 50 bp, synthetic construct
  source 1..50: mol_type = other DNA
gaaacgcctcaccactggatttgatttgcaatccactgcaggatcgtttc

SEQ ID NO: 57432 - DNA, 50 bp, synthetic construct
  source 1..50: mol_type = other DNA
gatctggcagattatattacggacatgtccgggagtccgtattcccgatg

SEQ ID NO: 57433 - DNA, 50 bp, synthetic construct
  source 1..50: mol_type = other DNA
gcaattttaaaaagtggattcgaacggcaagagccgaaggcccgacgtgg

SEQ ID NO: 57434 - DNA, 50 bp, synthetic construct
  source 1..50: mol_type = other DNA
taattaaatattaggaaagtcccatttggcactcaagcaatatttcctta

SEQ ID NO: 57435 - DNA, 50 bp, synthetic construct
  source 1..50: mol_type = other DNA
cgaatcaacgagcagcttgcgatcaaaatttcaatcttctttctgatcca

SEQ ID NO: 57436 - DNA, 50 bp, synthetic construct
  source 1..50: mol_type = other DNA
attactccttttctcatcgttagtctgctttatgtgcttactccacgaat

SEQ ID NO: 57437 - DNA, 50 bp, synthetic construct
  source 1..50: mol_type = other DNA
tttgtctttaccctcgtttttccgggtagtaatatttcggagaatacact

SEQ ID NO: 57438 - DNA, 50 bp, synthetic construct
  source 1..50: mol_type = other DNA
cgccggagaaaaggcgtaaggagcgccaaacttgccaacattctcgaata

SEQ ID NO: 57439 - DNA, 50 bp, synthetic construct
  source 1..50: mol_type = other DNA
tacagattttctgcacagatatattcatgcggtcgtccataaaaactgca

SEQ ID NO: 57440 - DNA, 50 bp, synthetic construct
  source 1..50: mol_type = other DNA
tttgttttattaacaattcccatttaactggttgtgtggtggaaatcaaa

SEQ ID NO: 57441 - DNA, 50 bp, synthetic construct
  source 1..50: mol_type = other DNA
agatcgccacgatccttatgcgctttggcgcaaatcatgtgtttattggt

SEQ ID NO: 57442 - DNA, 50 bp, synthetic construct
  source 1..50: mol_type = other DNA
aatttgccgcatccgatgaaaaggtcgaatttggaaagaccgctcacgca

SEQ ID NO: 57443 - DNA, 50 bp, synthetic construct
  source 1..50: mol_type = other DNA
cggaatacaccgaaagcggaacaggtcttttcatttttcttgggactcac

SEQ ID NO: 57444 - DNA, 50 bp, synthetic construct
  source 1..50: mol_type = other DNA
cagcggaatatactacacgaagatattaactttatcagtattttgtgctt

SEQ ID NO: 57445 - DNA, 50 bp, synthetic construct
  source 1..50: mol_type = other DNA
gaggtcaatcattgattctatattcctatatagaaagtatataaatcccc

SEQ ID NO: 57446 - DNA, 50 bp, synthetic construct
  source 1..50: mol_type = other DNA
atcattgtcggcttcagaagcgacttttccgtgctgccaccgaaggcaga

SEQ ID NO: 57447 - DNA, 50 bp, synthetic construct
  source 1..50: mol_type = other DNA
gtgcccaaatatggccggtatttttcatcaagcctgccatatttgacgat

SEQ ID NO: 57448 - DNA, 50 bp, synthetic construct
  source 1..50: mol_type = other DNA
aaaaccttctttctgccgtaaaaaagcagggcagtgtgaaaggagttttt

SEQ ID NO: 57449 - DNA, 50 bp, synthetic construct
  source 1..50: mol_type = other DNA
gcaaaataaactactacacaagagattgcttgtgtagtagttttttgcat

SEQ ID NO: 57450 - DNA, 50 bp, synthetic construct
  source 1..50: mol_type = other DNA
acacaaaagtacttgattaaatctttacatttgctcaaaaattttttata

SEQ ID NO: 57451 - DNA, 50 bp, synthetic construct
  source 1..50: mol_type = other DNA
ctatatatcactctaaatgatgtatataaattatttttagagttactaaa

SEQ ID NO: 57452 - DNA, 50 bp, synthetic construct
  source 1..50: mol_type = other DNA
ctcaaaatgctgatcggagaccgtttcggaacggatttcagctttttgat

SEQ ID NO: 57453 - DNA, 50 bp, synthetic construct
  source 1..50: mol_type = other DNA
tacaaaaataacagccagcacatgaacgctcaataaaaatttcttttgtg

SEQ ID NO: 57454 - DNA, 50 bp, synthetic construct
  source 1..50: mol_type = other DNA
atgtgcagtgtttcactcttcatgtcctggtccgttgacacacggcagta

SEQ ID NO: 57455 - DNA, 50 bp, synthetic construct
  source 1..50: mol_type = other DNA
aagtgttactcatctgcgctcaccacgaggttgagagataatagcagttc

SEQ ID NO: 57456 - DNA, 50 bp, synthetic construct
  source 1..50: mol_type = other DNA
gccatttttctcttcctttcctataacagtgaaaggatccactttatcag

SEQ ID NO: 57457 - DNA, 50 bp, synthetic construct
  source 1..50: mol_type = other DNA
tgccggacagaatccctgtcaggatattttctttacaatcctgtcctgct

SEQ ID NO: 57458 - DNA, 50 bp, synthetic construct
  source 1..50: mol_type = other DNA
agtatgctggagaatgaaaaatataaagtggtgtgtacggacaggattga

SEQ ID NO: 57459 - DNA, 50 bp, synthetic construct
  source 1..50: mol_type = other DNA
ttgggatgagattcctgatcggcttttttccatctggatctgcagccgga

SEQ ID NO: 57460 - DNA, 50 bp, synthetic construct
  source 1..50: mol_type = other DNA
taaagctcctgctccttatcgggaatttttgatgcggaggatgaggtttc

SEQ ID NO: 57461 - DNA, 50 bp, synthetic construct
  source 1..50: mol_type = other DNA
aagtcttttctgccacacctttcatctgatagaaaaaccagagttgaact

SEQ ID NO: 57462 - DNA, 50 bp, synthetic construct
  source 1..50: mol_type = other DNA
tttggggaaccttacaaatgtgtgatgttacatttgtgaagtatagcctc

SEQ ID NO: 57463 - DNA, 50 bp, synthetic construct
  source 1..50: mol_type = other DNA
agcgttccatctccctggtgggcatatgcccaagctaattctggccgatg

SEQ ID NO: 57464 - DNA, 50 bp, synthetic construct
  source 1..50: mol_type = other DNA
cgattgttacaaaagtatatgttccgtaactggatattcgctaactatct

SEQ ID NO: 57465 - DNA, 50 bp, synthetic construct
  source 1..50: mol_type = other DNA
gcttcccatgctataatttgtttgctctgctgaatgagagggtgacgttc

SEQ ID NO: 57466 - DNA, 50 bp, synthetic construct
  source 1..50: mol_type = other DNA
gctgtacggtctgttccatgggatcaatgccaatcagcagaccgacactc

SEQ ID NO: 57467 - DNA, 50 bp, synthetic construct
  source 1..50: mol_type = other DNA
atatcgccaaataatatcttataaatttataagaacacttttgatatttt

SEQ ID NO: 57468 - DNA, 50 bp, synthetic construct
  source 1..50: mol_type = other DNA
agaatgtgagcaaatgaaagaaatgcaattcggatattgacaggagcagc

SEQ ID NO: 57469 - DNA, 50 bp, synthetic construct
  source 1..50: mol_type = other DNA
acttaaatttacgcgtgatatctttctatattaaatagcgaaatttacac

SEQ ID NO: 57470 - DNA, 50 bp, synthetic construct
  source 1..50: mol_type = other DNA
aatcggctttatatccactcatttcggtctccctgaattacctgccgcgc

SEQ ID NO: 57471 - DNA, 50 bp, synthetic construct
  source 1..50: mol_type = other DNA
tgaatggcttttccaggcatttttctggtaaagcccggaaaaaaagtaag

SEQ ID NO: 57472 - DNA, 50 bp, synthetic construct
  source 1..50: mol_type = other DNA
acaggattcaaaaacacggcccacacgttatatctatttttgaaccctgt

SEQ ID NO: 57473 - DNA, 50 bp, synthetic construct
  source 1..50: mol_type = other DNA
aaacctccattatgtttgcttttgataaaaaccaaacctaaaaataaatt

SEQ ID NO: 57474 - DNA, 50 bp, synthetic construct
  source 1..50: mol_type = other DNA
ggtgaccaccaagacaggactgaacttggaggaagcctttggtggtcaga

SEQ ID NO: 57475 - DNA, 50 bp, synthetic construct
  source 1..50: mol_type = other DNA
tgttgtactaattcgacactacctgtaggtggtgtaaagttagtgcaaca

SEQ ID NO: 57476 - DNA, 50 bp, synthetic construct
  source 1..50: mol_type = other DNA
gtgtcgctgccgatgactgcccggagccggggcctattcggccccgaccg

SEQ ID NO: 57477 - DNA, 50 bp, synthetic construct
  source 1..50: mol_type = other DNA
acgatttccgccgcaccatcatccgcggatggatggtaggcgggatcaca

SEQ ID NO: 57478 - DNA, 50 bp, synthetic construct
  source 1..50: mol_type = other DNA
aaaattgaattccaggctgccatccggatgtgttcaaagaagaaaattgc

SEQ ID NO: 57479 - DNA, 50 bp, synthetic construct
  source 1..50: mol_type = other DNA
attcatcactctgaaacgcacttattcagaatccagcaaaagtttataaa

SEQ ID NO: 57480 - DNA, 50 bp, synthetic construct
  source 1..50: mol_type = other DNA
gtgggtgcagtcgtttatgcgcaacttttgcgatacggccctggaccttg

SEQ ID NO: 57481 - DNA, 50 bp, synthetic construct
  source 1..50: mol_type = other DNA
ccggagatgcccaaggccacatagatctatgtggatttccgcccctcccc

SEQ ID NO: 57482 - DNA, 50 bp, synthetic construct
  source 1..50: mol_type = other DNA
ggaaatctctccgtccggtccgccgttacgggattaacacattcttttgg

SEQ ID NO: 57483 - DNA, 50 bp, synthetic construct
  source 1..50: mol_type = other DNA
tagggcacacctcccgtattccaatatgatgcgccgcatgggcatcaccg

SEQ ID NO: 57484 - DNA, 50 bp, synthetic construct
  source 1..50: mol_type = other DNA
aaggccgacctcattggcgggttcatgtgaccaccaaggaggtgattttt

SEQ ID NO: 57485 - DNA, 50 bp, synthetic construct
  source 1..50: mol_type = other DNA
tctgattatcccgcctttaatattttgcgaagaaaggaagggcaatgaga

SEQ ID NO: 57486 - DNA, 50 bp, synthetic construct
  source 1..50: mol_type = other DNA
taatctgtgaatttgtcatttttattttctaaaagagaatgggaagatag

SEQ ID NO: 57487 - DNA, 50 bp, synthetic construct
  source 1..50: mol_type = other DNA
cgcggtttttgtattataatgcggttcataattataattcaaaaaaatac

SEQ ID NO: 57488 - DNA, 50 bp, synthetic construct
  source 1..50: mol_type = other DNA
gtcgtaaaagcatatatgaaaatacttacattcttttttcgaattactta

SEQ ID NO: 57489 - DNA, 50 bp, synthetic construct
  source 1..50: mol_type = other DNA
gtatttgacgatacgaccgaaaaataattttcgcttgtacagtggaaaaa

SEQ ID NO: 57490 - DNA, 50 bp, synthetic construct
  source 1..50: mol_type = other DNA
ttggataaaacccggcagcgaaaagacgccgccttccggcagcgtctcgt

SEQ ID NO: 57491 - DNA, 50 bp, synthetic construct
  source 1..50: mol_type = other DNA
cttttttgatttacgcttgacaagccgttgtcaaccgaacgaaaataaaa

SEQ ID NO: 57492 - DNA, 50 bp, synthetic construct
  source 1..50: mol_type = other DNA
tttgaatgtagggtaaaaaaatttgttatattttttactttactaaaaaa

SEQ ID NO: 57493 - DNA, 50 bp, synthetic construct
  source 1..50: mol_type = other DNA
ttatgagcccgacgagctgccagacttctgggacctcgctttctaccaga

SEQ ID NO: 57494 - DNA, 50 bp, synthetic construct
  source 1..50: mol_type = other DNA
cgttcgcctccggggagatggggaaatccacaacagcgtttaggtggttc

SEQ ID NO: 57495 - DNA, 50 bp, synthetic construct
  source 1..50: mol_type = other DNA
aataacagccagcaggaacgaatgttgacaggtatctgtcagctgcaggc

SEQ ID NO: 57496 - DNA, 50 bp, synthetic construct
  source 1..50: mol_type = other DNA
ttatctattatgattagtgtagcaattgcaagagtgattgtaaagcatct

SEQ ID NO: 57497 - DNA, 50 bp, synthetic construct
  source 1..50: mol_type = other DNA
ggtaatacttcttgccattttgctccagcaaataaatctatagtttttaa

SEQ ID NO: 57498 - DNA, 50 bp, synthetic construct
  source 1..50: mol_type = other DNA
gattttcataactactcacgcccctcactaattctatagttattttcatt

SEQ ID NO: 57499 - DNA, 50 bp, synthetic construct
  source 1..50: mol_type = other DNA
tcatatgatcatctccttaaaaatgggctcaaaatggggaaatcgaagtg

SEQ ID NO: 57500 - DNA, 50 bp, synthetic construct
  source 1..50: mol_type = other DNA
tatataagtatatttaaatacattaaaatgtatttcaatattactactaa

SEQ ID NO: 57501 - DNA, 50 bp, synthetic construct
  source 1..50: mol_type = other DNA
atgacaagtgaagaaaagaaactgttgcagagcatactaattcatggtat

SEQ ID NO: 57502 - DNA, 50 bp, synthetic construct
  source 1..50: mol_type = other DNA
actttgcattttataggatttcctgtaataaaaactataaaaccacatca

SEQ ID NO: 57503 - DNA, 50 bp, synthetic construct
  source 1..50: mol_type = other DNA
aacgaattcagggcattatctctgctcaaatactttaccatgacttttag

SEQ ID NO: 57504 - DNA, 50 bp, synthetic construct
  source 1..50: mol_type = other DNA
ccgcctatgcccgtgtctccacggacaaaggcggtgacgggcatgagtga

SEQ ID NO: 57505 - DNA, 50 bp, synthetic construct
  source 1..50: mol_type = other DNA
catatcaaagagaatctctgaactatgatacagaaatggagggaaaaatg

SEQ ID NO: 57506 - DNA, 50 bp, synthetic construct
  source 1..50: mol_type = other DNA
ataaatttggttacgctattttcaatgatcaataagaccaccaacatttc

SEQ ID NO: 57507 - DNA, 50 bp, synthetic construct
  source 1..50: mol_type = other DNA
gcgtttccagatagggatctgcgtgcaggcagttcctgttatggaacggg

SEQ ID NO: 57508 - DNA, 50 bp, synthetic construct
  source 1..50: mol_type = other DNA
attaaaggatttgcgctggatgatgattaggtgagattggatagttgccg

SEQ ID NO: 57509 - DNA, 50 bp, synthetic construct
  source 1..50: mol_type = other DNA
aacacaattggtcatatattgtcgtttaacaatgcataacctatattatt

SEQ ID NO: 57510 - DNA, 50 bp, synthetic construct
  source 1..50: mol_type = other DNA
ttgcattacagaagatcggaaatttttatgtccgagattcttccacagaa

SEQ ID NO: 57511 - DNA, 50 bp, synthetic construct
  source 1..50: mol_type = other DNA
tatggagctgtgggggaaagtccaaatgatacagtgaacgcagtaatata

SEQ ID NO: 57512 - DNA, 50 bp, synthetic construct
  source 1..50: mol_type = other DNA
aaatccgcatagatggtagtgcagagctgcaaaacaccactggcggcgga

SEQ ID NO: 57513 - DNA, 50 bp, synthetic construct
  source 1..50: mol_type = other DNA
cgggagcaaaaattacccggcaggtatctcaatcggaatttttgtttccg

SEQ ID NO: 57514 - DNA, 50 bp, synthetic construct
  source 1..50: mol_type = other DNA
gcgcattcaggagagcgcctaaaacgcggtaggggcttttttgtttggaa

SEQ ID NO: 57515 - DNA, 50 bp, synthetic construct
  source 1..50: mol_type = other DNA
agcgataattaaactcaccacctatataagtggataatagacgcattcag

SEQ ID NO: 57516 - DNA, 50 bp, synthetic construct
  source 1..50: mol_type = other DNA
cacacataattacctgaccttagacatcagaacggaggtgattaccaatg

SEQ ID NO: 57517 - DNA, 50 bp, synthetic construct
  source 1..50: mol_type = other DNA
ttcggcatatcaaaccctccggcaataatgattcagtatgtgcgcccgaa

SEQ ID NO: 57518 - DNA, 50 bp, synthetic construct
  source 1..50: mol_type = other DNA
gtggattttttatagagtgtcttgtacaattgcagctataatagtacaga

SEQ ID NO: 57519 - DNA, 50 bp, synthetic construct
  source 1..50: mol_type = other DNA
cacacctatacatcactcttttcgacagaaagttctgaacgatattactg

SEQ ID NO: 57520 - DNA, 50 bp, synthetic construct
  source 1..50: mol_type = other DNA
cgaagcatcgggagatactctcgacgtgatgattagactgctgcgctggc

SEQ ID NO: 57521 - DNA, 50 bp, synthetic construct
  source 1..50: mol_type = other DNA
gaaaaaatttcttatgcatctctcctcaccctcgccaaactcaactttta

SEQ ID NO: 57522 - DNA, 50 bp, synthetic construct
  source 1..50: mol_type = other DNA
agaaattgcctgtaccgcaggacggcagtcctgttgttacacccacctct

SEQ ID NO: 57523 - DNA, 50 bp, synthetic construct
  source 1..50: mol_type = other DNA
gagaacaaaatgaaagcattaagaataatcaagtattgtattatagcata

SEQ ID NO: 57524 - DNA, 50 bp, synthetic construct
  source 1..50: mol_type = other DNA
tcaatgatggaaatatctctttcaacaaaaactcatgtttctttcatgtc

SEQ ID NO: 57525 - DNA, 50 bp, synthetic construct
  source 1..50: mol_type = other DNA
tatgttaagtaattgggggtaagaattcttacccccaattactttcccac

SEQ ID NO: 57526 - DNA, 50 bp, synthetic construct
  source 1..50: mol_type = other DNA
gggaaccttcacatccatatccccatggaaatataatgaaccatgacccc

SEQ ID NO: 57527 - DNA, 50 bp, synthetic construct
  source 1..50: mol_type = other DNA
gatcaaccaatggaaacatatcttgcaagatttcgataaggaggatgaat

SEQ ID NO: 57528 - DNA, 50 bp, synthetic construct
  source 1..50: mol_type = other DNA
cgcttatttttagtggggtattcatctgaacagcccttataaaatagagc

SEQ ID NO: 57529 - DNA, 50 bp, synthetic construct
  source 1..50: mol_type = other DNA
caaactcattgtggtaggccagcatacgctgaatgacctcaggctgtaag

SEQ ID NO: 57530 - DNA, 50 bp, synthetic construct
  source 1..50: mol_type = other DNA
tgccgtgccttttctttcatttcaggctacatacaaagaaatgcacggtg

SEQ ID NO: 57531 - DNA, 50 bp, synthetic construct
  source 1..50: mol_type = other DNA
attcacctcccttggtgtgtgacatatcgggaagccaaagagaaagccgc

SEQ ID NO: 57532 - DNA, 50 bp, synthetic construct
  source 1..50: mol_type = other DNA
ctttgcgaacataaactgaaaaccgctcctttcagggcatgtgatcaagc

SEQ ID NO: 57533 - DNA, 50 bp, synthetic construct
  source 1..50: mol_type = other DNA
tctgaatataaatatcttttttgatcgtaaaactcatatttatgatgtat

SEQ ID NO: 57534 - DNA, 50 bp, synthetic construct
  source 1..50: mol_type = other DNA
cttgctgaatttttctaacgatactttgatcgttattcaatttcagttct

SEQ ID NO: 57535 - DNA, 50 bp, synthetic construct
  source 1..50: mol_type = other DNA
acggtttaacgtctgctcctgatagacatcaagagcatattttttccgta

SEQ ID NO: 57536 - DNA, 50 bp, synthetic construct
  source 1..50: mol_type = other DNA
acaatgaaattgctcagcaggcgtgtggatgcgggcaacacggtcattgt

SEQ ID NO: 57537 - DNA, 50 bp, synthetic construct
  source 1..50: mol_type = other DNA
atgatatggagaaaaccgttgttgatatataacggtttctacgggaatat

SEQ ID NO: 57538 - DNA, 50 bp, synthetic construct
  source 1..50: mol_type = other DNA
agagtacttcggttcgcttccattgatccgttgatacacggcagtaggct

SEQ ID NO: 57539 - DNA, 50 bp, synthetic construct
  source 1..50: mol_type = other DNA
gccgctggggttcctacggtcaaagggaatatactgcttaccccaaagaa

SEQ ID NO: 57540 - DNA, 50 bp, synthetic construct
  source 1..50: mol_type = other DNA
tttctttagagatgattgccgggttataattcttctgttctctttctaaa

SEQ ID NO: 57541 - DNA, 50 bp, synthetic construct
  source 1..50: mol_type = other DNA
tcagtatatttgaaagattatgtggaagccctgatgttcaaatatataga

SEQ ID NO: 57542 - DNA, 50 bp, synthetic construct
  source 1..50: mol_type = other DNA
aaaatctgacatttccgctctatcgctgcctttttgaggtgttcagcaaa

SEQ ID NO: 57543 - DNA, 50 bp, synthetic construct
  source 1..50: mol_type = other DNA
tttgataatacaacacaagaagataaaccttctaagtaaaaattattaaa

SEQ ID NO: 57544 - DNA, 50 bp, synthetic construct
  source 1..50: mol_type = other DNA
cctttcaagcgtgttttacacctgcgcaggttcaaatcctgctgctccga

SEQ ID NO: 57545 - DNA, 50 bp, synthetic construct
  source 1..50: mol_type = other DNA
gcgtttctttcgtgtcggcctggctccctaccgggtcaccaaacgttcgc

SEQ ID NO: 57546 - DNA, 50 bp, synthetic construct
  source 1..50: mol_type = other DNA
ttggatatataatcgttgacggaaagttccggtaacaagggtatcgcctg

SEQ ID NO: 57547 - DNA, 50 bp, synthetic construct
  source 1..50: mol_type = other DNA
gagagggagagattcaggagtttgcaaaacaccctgaatcaagtatacta

SEQ ID NO: 57548 - DNA, 50 bp, synthetic construct
  source 1..50: mol_type = other DNA
aatatgtgagtatttgaattgtgataacactggatatatataaaactatg

SEQ ID NO: 57549 - DNA, 50 bp, synthetic construct
  source 1..50: mol_type = other DNA
caattgataatcatgacgaaagttatggcagaagtggagtttatcaatgg

SEQ ID NO: 57550 - DNA, 50 bp, synthetic construct
  source 1..50: mol_type = other DNA
tttcctccatttttgtaaggcttatctaaagcttgacgaacggtccgata

SEQ ID NO: 57551 - DNA, 50 bp, synthetic construct
  source 1..50: mol_type = other DNA
gctgacccttctgctgatttttggaataaagttgcaaaagcattgtctgt

SEQ ID NO: 57552 - DNA, 50 bp, synthetic construct
  source 1..50: mol_type = other DNA
taatttcccgtcatgccgtgataatattaaatatgaaggagagaaaatta

SEQ ID NO: 57553 - DNA, 50 bp, synthetic construct
  source 1..50: mol_type = other DNA
tatgaagatttcttaaatggatataggaaactatgaaaataaaagtcatt

SEQ ID NO: 57554 - DNA, 50 bp, synthetic construct
  source 1..50: mol_type = other DNA
gcatattatatcacctttctcttcaagaaaaatgaaatgataaaatattt

SEQ ID NO: 57555 - DNA, 50 bp, synthetic construct
  source 1..50: mol_type = other DNA
cttgttataaacatcccaccccataggtttggcaggctttctttaaccgt

SEQ ID NO: 57556 - DNA, 50 bp, synthetic construct
  source 1..50: mol_type = other DNA
tgatagaaaataaatgaaaatattatttctttgagagcttttttttattt

SEQ ID NO: 57557 - DNA, 50 bp, synthetic construct
  source 1..50: mol_type = other DNA
ataatcaaatagcaagtcatttaatgagtgcaatattgctatatttattc

SEQ ID NO: 57558 - DNA, 50 bp, synthetic construct
  source 1..50: mol_type = other DNA
taaaaaacatcaatgtattcgcggggcagtaaatttattgatggttgcag

SEQ ID NO: 57559 - DNA, 50 bp, synthetic construct
  source 1..50: mol_type = other DNA
gttgtttaaccgtctttgttttataaagaaagactaaattttccatagga

SEQ ID NO: 57560 - DNA, 50 bp, synthetic construct
  source 1..50: mol_type = other DNA
gtcttcaaaaactttatttctgttaaaggaggaataaaatggctgagaac

SEQ ID NO: 57561 - DNA, 50 bp, synthetic construct
  source 1..50: mol_type = other DNA
ttaatacttcagttgccaatgtattgatccaaaaagaagtgaaggatgga

SEQ ID NO: 57562 - DNA, 50 bp, synthetic construct
  source 1..50: mol_type = other DNA
cgtttgagaaattattggacagtccagaatatctgatagaataggaaaag

SEQ ID NO: 57563 - DNA, 50 bp, synthetic construct
  source 1..50: mol_type = other DNA
gtacaaaaataacagccagcaaggaatcgagcagatcaatgacgttgtac

SEQ ID NO: 57564 - DNA, 50 bp, synthetic construct
  source 1..50: mol_type = other DNA
tactgccgtgtttccacggatcaggacatgaagagtgaaacactgcggat

SEQ ID NO: 57565 - DNA, 50 bp, synthetic construct
  source 1..50: mol_type = other DNA
aaatcttagagttctataaccaaatttaaaacaataaaactataaaaatt

SEQ ID NO: 57566 - DNA, 50 bp, synthetic construct
  source 1..50: mol_type = other DNA
agggtactgtaacgatcgatggcaaatggcatttatacctacagtactgt

SEQ ID NO: 57567 - DNA, 50 bp, synthetic construct
  source 1..50: mol_type = other DNA
ggtgtcaggatgccttccttttcaaatcccctccctcgcaccatgacgaa

SEQ ID NO: 57568 - DNA, 50 bp, synthetic construct
  source 1..50: mol_type = other DNA
gtaaaaacttaagcgaggtactaacatttacacttcgtttaagtatggta

SEQ ID NO: 57569 - DNA, 50 bp, synthetic construct
  source 1..50: mol_type = other DNA
gtgctcaacgccgttgaagaactggatagttgcaacggcagtctgagcga

SEQ ID NO: 57570 - DNA, 50 bp, synthetic construct
  source 1..50: mol_type = other DNA
ttacatgttcaaaatcagccatattataatacatgattttgtcgatacat

SEQ ID NO: 57571 - DNA, 50 bp, synthetic construct
  source 1..50: mol_type = other DNA
tgcaggcactcggaaaaggccgcaaccccggctgtggccgagtgccgttc

SEQ ID NO: 57572 - DNA, 50 bp, synthetic construct
  source 1..50: mol_type = other DNA
tgattctttaaataacttaggagtatcactgagccagtttattacaaggc

SEQ ID NO: 57573 - DNA, 50 bp, synthetic construct
  source 1..50: mol_type = other DNA
ttctgcggtctttgtttttttatacactcggatatggaaagaccgctccc

SEQ ID NO: 57574 - DNA, 50 bp, synthetic construct
  source 1..50: mol_type = other DNA
atgggtttatctctggttcagatggtcatgtcaaccattacgaaaatcaa

SEQ ID NO: 57575 - DNA, 50 bp, synthetic construct
  source 1..50: mol_type = other DNA
ttattaaacctaatttacagtaagttctacctccgcttttcttttaataa

SEQ ID NO: 57576 - DNA, 50 bp, synthetic construct
  source 1..50: mol_type = other DNA
ccatatccagcatgacgctgtaatctacctcagagtcatgggctatttgc

SEQ ID NO: 57577 - DNA, 50 bp, synthetic construct
  source 1..50: mol_type = other DNA
ataatcttggctaaacggggagagaactcactaatgctgtacttgatttt

SEQ ID NO: 57578 - DNA, 50 bp, synthetic construct
  source 1..50: mol_type = other DNA
catattttttcgtaactttcccgatgatgtttgttttattgacaaatatt

SEQ ID NO: 57579 - DNA, 50 bp, synthetic construct
  source 1..50: mol_type = other DNA
ctaaagggtgtaattatcaagttataatctgtagtaatcgttttctgcag

SEQ ID NO: 57580 - DNA, 50 bp, synthetic construct
  source 1..50: mol_type = other DNA
tctttgtaactgtttatttcttatttataaaaaataaagataatgaaata

SEQ ID NO: 57581 - DNA, 50 bp, synthetic construct
  source 1..50: mol_type = other DNA
atcacaggtttataatcatcataacataccgataattatacccttgaaac

SEQ ID NO: 57582 - DNA, 50 bp, synthetic construct
  source 1..50: mol_type = other DNA
gataatttgcttttattcattctccctagaatgcctcagaatgcatttta

SEQ ID NO: 57583 - DNA, 50 bp, synthetic construct
  source 1..50: mol_type = other DNA
atcatcctttctctgaatataaatatatctttgatcacggttgccgtgat

SEQ ID NO: 57584 - DNA, 50 bp, synthetic construct
  source 1..50: mol_type = other DNA
ccttcacagacattttttccttctttcttatacaaaaatgtcacttagca

SEQ ID NO: 57585 - DNA, 50 bp, synthetic construct
  source 1..50: mol_type = other DNA
aagcagatgcagccttcgtgttctgcaaagcggtgaggctcttccctttg

SEQ ID NO: 57586 - DNA, 50 bp, synthetic construct
  source 1..50: mol_type = other DNA
tataaagcctaatagattgaatttacataatcagcataaggcactttacc

SEQ ID NO: 57587 - DNA, 50 bp, synthetic construct
  source 1..50: mol_type = other DNA
cgcattttaaaagaccttgaggatttaggctctggcgcttttgttatgcc

SEQ ID NO: 57588 - DNA, 50 bp, synthetic construct
  source 1..50: mol_type = other DNA
ttttatttataatttattatgtatttatcttatcaattttagaaattaaa

SEQ ID NO: 57589 - DNA, 50 bp, synthetic construct
  source 1..50: mol_type = other DNA
ttacggaggaccagattctctttgcgtagagagcttctggagtaccataa

SEQ ID NO: 57590 - DNA, 50 bp, synthetic construct
  source 1..50: mol_type = other DNA
tgtttaatcctgctattactttctgcagattttcatgggcagtgagattg

SEQ ID NO: 57591 - DNA, 50 bp, synthetic construct
  source 1..50: mol_type = other DNA
aaaaagactcctttttgaaatttattgaccttctataaaggaggtccttt

SEQ ID NO: 57592 - DNA, 50 bp, synthetic construct
  source 1..50: mol_type = other DNA
cttataaatcttccattcatagttacaactttttataatacatttaaaat

SEQ ID NO: 57593 - DNA, 50 bp, synthetic construct
  source 1..50: mol_type = other DNA
atttgttattacaaactcaagtgatatcacagctatttttataaagaaag

SEQ ID NO: 57594 - DNA, 50 bp, synthetic construct
  source 1..50: mol_type = other DNA
tcagaaaattaagccactgtttgtaatataaccctcgaataaagttctta

SEQ ID NO: 57595 - DNA, 50 bp, synthetic construct
  source 1..50: mol_type = other DNA
aactcacggcctcttgaaccccattcttttatttcaagaggaatcacttg

SEQ ID NO: 57596 - DNA, 50 bp, synthetic construct
  source 1..50: mol_type = other DNA
tttagtaaagaaatcactaaataatatccattggatatgagtatttttaa

SEQ ID NO: 57597 - DNA, 50 bp, synthetic construct
  source 1..50: mol_type = other DNA
tttaccaaatctatatatttttaaaattatgtatagaaagaattggaggc

SEQ ID NO: 57598 - DNA, 50 bp, synthetic construct
  source 1..50: mol_type = other DNA
cttatttttattccttaaaagaaaatttcccattccaatcgcatttttag

SEQ ID NO: 57599 - DNA, 50 bp, synthetic construct
  source 1..50: mol_type = other DNA
cgttcctgacgactcatatataataaattttatattcatcgtcattcatc

SEQ ID NO: 57600 - DNA, 50 bp, synthetic construct
  source 1..50: mol_type = other DNA
aaattcagttaaagaacttttagcaccgacgaaatattggaacgtatttt

SEQ ID NO: 57601 - DNA, 50 bp, synthetic construct
  source 1..50: mol_type = other DNA
cgtttgttgtatcgttgacaacgcttctcttgtcagttatctctcaaatc

SEQ ID NO: 57602 - DNA, 50 bp, synthetic construct
  source 1..50: mol_type = other DNA
aatcactccttttgtcaattctaaatttgacttatacaaaagaaaccttt

SEQ ID NO: 57603 - DNA, 50 bp, synthetic construct
  source 1..50: mol_type = other DNA
tttcaatggtataataaaatctgcttggagaggaggagataccatggatg

SEQ ID NO: 57604 - DNA, 50 bp, synthetic construct
  source 1..50: mol_type = other DNA
tccagaaacggcagagattataaatcatgccttatattgccggatttggt

SEQ ID NO: 57605 - DNA, 50 bp, synthetic construct
  source 1..50: mol_type = other DNA
cctgccgggattctgacagtggcaagaatggatgttttaaaatttactgg

SEQ ID NO: 57606 - DNA, 50 bp, synthetic construct
  source 1..50: mol_type = other DNA
atcagcagatgtaagcttattgatctaatccgaagcttattcttgctgat

SEQ ID NO: 57607 - DNA, 50 bp, synthetic construct
  source 1..50: mol_type = other DNA
agacattcctccaatccctcctttttatactcttttttggaggtgggaac

SEQ ID NO: 57608 - DNA, 50 bp, synthetic construct
  source 1..50: mol_type = other DNA
gctgtttatgggcatttactatcatatgatagtttctacctatttatatg

SEQ ID NO: 57609 - DNA, 50 bp, synthetic construct
  source 1..50: mol_type = other DNA
aatcatactatgtttgtggatgcaaaagtggttggtatcatattatgata

SEQ ID NO: 57610 - DNA, 50 bp, synthetic construct
  source 1..50: mol_type = other DNA
catatcaagtatcagttctccaaattttttctgccttgatggaaccatcc

SEQ ID NO: 57611 - DNA, 50 bp, synthetic construct
  source 1..50: mol_type = other DNA
ccttttaagaaaaagccttgaattttaattgctttcatttatttcaaccc

SEQ ID NO: 57612 - DNA, 50 bp, synthetic construct
  source 1..50: mol_type = other DNA
cggatattttagtgttgcttgttttagaacacacaacctaaaaccgaaga

SEQ ID NO: 57613 - DNA, 50 bp, synthetic construct
  source 1..50: mol_type = other DNA
ccatctgtgaagagcagagaaaaatttttttggctggcttggctgggcat

SEQ ID NO: 57614 - DNA, 50 bp, synthetic construct
  source 1..50: mol_type = other DNA
attaaactccacttgtgcagaagagaaacatggcagaagtggagtttatc

SEQ ID NO: 57615 - DNA, 50 bp, synthetic construct
  source 1..50: mol_type = other DNA
gttatttttcttattgattaatatttaatttataaattaagaattaaaac

SEQ ID NO: 57616 - DNA, 50 bp, synthetic construct
  source 1..50: mol_type = other DNA
ccctttattttaactttttcggatattgccgaacacgttgaaatgactgg

SEQ ID NO: 57617 - DNA, 50 bp, synthetic construct
  source 1..50: mol_type = other DNA
aaatcctttgacacatctgccaaaggtttgacataattttcaaggtattt

SEQ ID NO: 57618 - DNA, 50 bp, synthetic construct
  source 1..50: mol_type = other DNA
ggtgcgaccgctttcatatcgctaataatgcctaaagttacgatgatacc

SEQ ID NO: 57619 - DNA, 50 bp, synthetic construct
  source 1..50: mol_type = other DNA
ccggaagcccagctaaccagttcatcgtatcttattggcttcatcctctt

SEQ ID NO: 57620 - DNA, 50 bp, synthetic construct
  source 1..50: mol_type = other DNA
tggccagattataccattttcatcatgataaagcacgaataatcccctct

SEQ ID NO: 57621 - DNA, 50 bp, synthetic construct
  source 1..50: mol_type = other DNA
caggcgctcccgatgaccggatattgaggtgttacggggcatagcgcagt

SEQ ID NO: 57622 - DNA, 50 bp, synthetic construct
  source 1..50: mol_type = other DNA
ttatatcagcgagaatcctctctatggaaagctgattcttcctgaagctg

SEQ ID NO: 57623 - DNA, 50 bp, synthetic construct
  source 1..50: mol_type = other DNA
aatacaattccagaatatgtttttgcagaaattgaagatggcagcgtact

SEQ ID NO: 57624 - DNA, 50 bp, synthetic construct
  source 1..50: mol_type = other DNA
tcggaagtcaaaattttatgttgtacgcaacatatcttttatgctggcag

SEQ ID NO: 57625 - DNA, 50 bp, synthetic construct
  source 1..50: mol_type = other DNA
catttgacaaagtctgtgtaaatctatattttaacacaacaagtcgtttt

SEQ ID NO: 57626 - DNA, 50 bp, synthetic construct
  source 1..50: mol_type = other DNA
tcaatatcggaaacttccattttcctgaaaataattcttttacttgttct

SEQ ID NO: 57627 - DNA, 50 bp, synthetic construct
  source 1..50: mol_type = other DNA
tatgtaccgatggcagcacaggctgcatccactcttgggatgcagcagta

SEQ ID NO: 57628 - DNA, 50 bp, synthetic construct
  source 1..50: mol_type = other DNA
ctactacacaagcaatacccgtctgtgctggggtatctcttgtgtagtag

SEQ ID NO: 57629 - DNA, 50 bp, synthetic construct
  source 1..50: mol_type = other DNA
gatattgaacggctgtccctttttcgttttagctgcaacatatatttact

SEQ ID NO: 57630 - DNA, 50 bp, synthetic construct
  source 1..50: mol_type = other DNA
taaggttttaatataactaattgaatttccttacataacataaaaaagcc

SEQ ID NO: 57631 - DNA, 50 bp, synthetic construct
  source 1..50: mol_type = other DNA
gcattagcacatcctattgccattccgataacaataggttctgctaaaaa

SEQ ID NO: 57632 - DNA, 50 bp, synthetic construct
  source 1..50: mol_type = other DNA
ggcattatgattgctcctttctaatatttaataagagctatatgactcaa

SEQ ID NO: 57633 - DNA, 50 bp, synthetic construct
  source 1..50: mol_type = other DNA
caaaccctccctttgggctttcttggcagatgtgtcaaaggatttacggt

SEQ ID NO: 57634 - DNA, 50 bp, synthetic construct
  source 1..50: mol_type = other DNA
cgtatgcaggcctacggtttttaccggtggactgtatgggctttttaatt

SEQ ID NO: 57635 - DNA, 50 bp, synthetic construct
  source 1..50: mol_type = other DNA
ccatttcacttgtatatacatcactcttgatgtcaaggaaataaaatcaa

SEQ ID NO: 57636 - DNA, 50 bp, synthetic construct
  source 1..50: mol_type = other DNA
ttcatttttcttaatatctgacgttaagaaaaacatcgaagaataagcac

SEQ ID NO: 57637 - DNA, 50 bp, synthetic construct
  source 1..50: mol_type = other DNA
cttctgaggatttagaagatgcttatatttgcggtctcaaactggaaaat

SEQ ID NO: 57638 - DNA, 50 bp, synthetic construct
  source 1..50: mol_type = other DNA
ccgcctgcggattcgcaggaagccccggctccctctcaagccagagggca

SEQ ID NO: 57639 - DNA, 50 bp, synthetic construct
  source 1..50: mol_type = other DNA
gtttcaggggattttcaaccacatacatggacatctgattccaatgaaac

SEQ ID NO: 57640 - DNA, 50 bp, synthetic construct
  source 1..50: mol_type = other DNA
gctctgaaagaatgctggatggatgaatgaatccagaattaagtctccag

SEQ ID NO: 57641 - DNA, 50 bp, synthetic construct
  source 1..50: mol_type = other DNA
tggtgtttttccggtactaaaatatatcgattagtatgggaatatgtcca

SEQ ID NO: 57642 - DNA, 50 bp, synthetic construct
  source 1..50: mol_type = other DNA
aaaatatcaacggttagcaccttgcacaaagaagtaaccgtttaattttg

SEQ ID NO: 57643 - DNA, 50 bp, synthetic construct
  source 1..50: mol_type = other DNA
gcacagatgaatatacgattacctttatccaatagggtaattatcttgaa

SEQ ID NO: 57644 - DNA, 50 bp, synthetic construct
  source 1..50: mol_type = other DNA
attttactaaaatgggacagaatcattgattatcagtataatagtaaaat

SEQ ID NO: 57645 - DNA, 50 bp, synthetic construct
  source 1..50: mol_type = other DNA
gctaagcccaacagactctgcctttcctggcacagtttcactctgtaaat

SEQ ID NO: 57646 - DNA, 50 bp, synthetic construct
  source 1..50: mol_type = other DNA
gagcttgcggttaaacttttaaagttgtgaaaaatccggatatcctgctc

SEQ ID NO: 57647 - DNA, 50 bp, synthetic construct
  source 1..50: mol_type = other DNA
cccctcttattctgctttctgacggccgtcatctctaagaaatcttttaa

SEQ ID NO: 57648 - DNA, 50 bp, synthetic construct
  source 1..50: mol_type = other DNA
taacatttcttccattttttctttttaaagaaaaaattaatcataggtag

SEQ ID NO: 57649 - DNA, 50 bp, synthetic construct
  source 1..50: mol_type = other DNA
ccgtccgcattcccgggttcaggaatggaccagaggataaatgacagggg

SEQ ID NO: 57650 - DNA, 50 bp, synthetic construct
  source 1..50: mol_type = other DNA
ctcaaaagataattgaataggaactcttgttggttcaacatccttgataa

SEQ ID NO: 57651 - DNA, 50 bp, synthetic construct
  source 1..50: mol_type = other DNA
tccatcgtcttttgctgtacgcacatatatagactaccaaaacggaagga

SEQ ID NO: 57652 - DNA, 50 bp, synthetic construct
  source 1..50: mol_type = other DNA
ccgtatcagtttgccgagtagtttataaagggatggggagaaatcaagaa

SEQ ID NO: 57653 - DNA, 50 bp, synthetic construct
  source 1..50: mol_type = other DNA
tgatttatttaaaaatagtatttctggaaatactatatttaagagtattt

SEQ ID NO: 57654 - DNA, 50 bp, synthetic construct
  source 1..50: mol_type = other DNA
gttgcttctgccgctgacgaaaaaccatatgataaggaagaagaagctaa

SEQ ID NO: 57655 - DNA, 50 bp, synthetic construct
  source 1..50: mol_type = other DNA
tcatgcggatttgaacccacttgaaataatgtgtaaagtgaggtgcctgc

SEQ ID NO: 57656 - DNA, 50 bp, synthetic construct
  source 1..50: mol_type = other DNA
gcaatatcagcaacttcctctgtaattgacaagaattgtggtgatattat

SEQ ID NO: 57657 - DNA, 50 bp, synthetic construct
  source 1..50: mol_type = other DNA
tttgactactttttgtcccggggaacccccacggataacaagtaatccgt

SEQ ID NO: 57658 - DNA, 50 bp, synthetic construct
  source 1..50: mol_type = other DNA
accaaagaaaaacgcctaagaacgcaaagccaggagctttctgctttatt

SEQ ID NO: 57659 - DNA, 50 bp, synthetic construct
  source 1..50: mol_type = other DNA
gtcgcagcctatgcccgtgtttcaacggaaatcgcggcattgcctgcggt

SEQ ID NO: 57660 - DNA, 50 bp, synthetic construct
  source 1..50: mol_type = other DNA
tccgccgtatgaacggcaaggaaggaaaggaacgcaaatcatggcaaata

SEQ ID NO: 57661 - DNA, 50 bp, synthetic construct
  source 1..50: mol_type = other DNA
ataaaaatcacagtataaatgcttcgaaacatacagcggcaccgacttaa

SEQ ID NO: 57662 - DNA, 50 bp, synthetic construct
  source 1..50: mol_type = other DNA
agggattcgaaccctagacccacagctaccggacgatcatcgtagtcact

SEQ ID NO: 57663 - DNA, 50 bp, synthetic construct
  source 1..50: mol_type = other DNA
gcgtggatccccggttttgccttgcggaagaataaccgaggtatcgcatg

SEQ ID NO: 57664 - DNA, 50 bp, synthetic construct
  source 1..50: mol_type = other DNA
cttcatcccagccgcgcgtagcctgccggataacgccggctggcgaggaa

SEQ ID NO: 57665 - DNA, 50 bp, synthetic construct
  source 1..50: mol_type = other DNA
catccaaaatgtaatacttaccattactggtatgtgtgccattttaatca

SEQ ID NO: 57666 - DNA, 50 bp, synthetic construct
  source 1..50: mol_type = other DNA
caaactgtaaatgtattctgcctgcttagttacaactgctgccttctttt

SEQ ID NO: 57667 - DNA, 50 bp, synthetic construct
  source 1..50: mol_type = other DNA
attgatggagatattttcctgcatagattccggatgatattctcatggat

SEQ ID NO: 57668 - DNA, 50 bp, synthetic construct
  source 1..50: mol_type = other DNA
cagtctgctcctttcgtatttcttggccgaaacgcgcgaggagcttctgt

SEQ ID NO: 57669 - DNA, 50 bp, synthetic construct
  source 1..50: mol_type = other DNA
tgttatctcgataacgttcattgagctccggctcgcttatccagggcgtg

SEQ ID NO: 57670 - DNA, 50 bp, synthetic construct
  source 1..50: mol_type = other DNA
gagcgatgagagctgtgagatctgtgcaaatttcacactttacgcttgat

SEQ ID NO: 57671 - DNA, 50 bp, synthetic construct
  source 1..50: mol_type = other DNA
ttcacggaaacactctccgattccagccgatccttgacgctttcaacgaa

SEQ ID NO: 57672 - DNA, 50 bp, synthetic construct
  source 1..50: mol_type = other DNA
aaatataaaacccagtctatcatcgtaaattggctatggcttcatccttc

SEQ ID NO: 57673 - DNA, 50 bp, synthetic construct
  source 1..50: mol_type = other DNA
cgtactaaccgcactatagcaagtcagctacgaatagtccgactatcaca

SEQ ID NO: 57674 - DNA, 50 bp, synthetic construct
  source 1..50: mol_type = other DNA
ctcacatccctggcggatcttcagatccatagatgatgtagtccatggta

SEQ ID NO: 57675 - DNA, 50 bp, synthetic construct
  source 1..50: mol_type = other DNA
aaggaaagagatttataaaaatattgatatgagaataggaatctatccca

SEQ ID NO: 57676 - DNA, 50 bp, synthetic construct
  source 1..50: mol_type = other DNA
atatttaatatagtttttagttgcatataaataacgctcatattaaatca

SEQ ID NO: 57677 - DNA, 50 bp, synthetic construct
  source 1..50: mol_type = other DNA
aaacgattttagtggaaaattgttccgccggcttgtgagctatttctgct

SEQ ID NO: 57678 - DNA, 50 bp, synthetic construct
  source 1..50: mol_type = other DNA
ttgtttttattataaaattctttaaatggaggtttttaatttggaaaaaa

SEQ ID NO: 57679 - DNA, 50 bp, synthetic construct
  source 1..50: mol_type = other DNA
caaactattgaaaatgaaggctacttatagtcagaatttaaaattttttc

SEQ ID NO: 57680 - DNA, 50 bp, synthetic construct
  source 1..50: mol_type = other DNA
ctacttaggcagcgagagcaacttcgcagccgttgagactgcgaggtttt

SEQ ID NO: 57681 - DNA, 50 bp, synthetic construct
  source 1..50: mol_type = other DNA
ccacatcaataggtagctttccacgggtgggctgctaccctttattctgt

SEQ ID NO: 57682 - DNA, 50 bp, synthetic construct
  source 1..50: mol_type = other DNA
tgattactttgattctcatactctgtttcaactgaaagggaaattagagt

SEQ ID NO: 57683 - DNA, 50 bp, synthetic construct
  source 1..50: mol_type = other DNA
tggaaaataaccacgaagccatcatcagcctttttccggggacgtataca

SEQ ID NO: 57684 - DNA, 50 bp, synthetic construct
  source 1..50: mol_type = other DNA
tgggattgctgattttcatattcttaatattatgaaaataaccctcccag

SEQ ID NO: 57685 - DNA, 50 bp, synthetic construct
  source 1..50: mol_type = other DNA
aaagactcattcctcctttcgcatgttggcgaacggaggaattattgaac

SEQ ID NO: 57686 - DNA, 50 bp, synthetic construct
  source 1..50: mol_type = other DNA
ggccgagaacccgacctatacggtatctataatagtttttccgcgcggaa

SEQ ID NO: 57687 - DNA, 50 bp, synthetic construct
  source 1..50: mol_type = other DNA
tgctcttttgcagatggtaaaaaaacgagagaaccgtctgcgaagcagac

SEQ ID NO: 57688 - DNA, 50 bp, synthetic construct
  source 1..50: mol_type = other DNA
tcattccgccgaccatcaatccgctgacggatcaggcacacgcgctcggc

SEQ ID NO: 57689 - DNA, 50 bp, synthetic construct
  source 1..50: mol_type = other DNA
ggcttcctgatgcagcacggtgtggacagaccgctccagagcagaaagct

SEQ ID NO: 57690 - DNA, 50 bp, synthetic construct
  source 1..50: mol_type = other DNA
ttatattaaaggcctgatttttcgtaactaaaatcaggggaagggcaatt

SEQ ID NO: 57691 - DNA, 50 bp, synthetic construct
  source 1..50: mol_type = other DNA
ctatcatagaaaggagcaaatgtcatccaaccctctattttctcttgcgt

SEQ ID NO: 57692 - DNA, 50 bp, synthetic construct
  source 1..50: mol_type = other DNA
gatagaatgtaaaaggacataatatctgtttcagcagtttgaattgctgg

SEQ ID NO: 57693 - DNA, 50 bp, synthetic construct
  source 1..50: mol_type = other DNA
gacgttatcagcactgttaggcagtagcctcttgcagttaaaataagtat

SEQ ID NO: 57694 - DNA, 50 bp, synthetic construct
  source 1..50: mol_type = other DNA
gggcttggaacaaggagaaacaagatttcgtctgtccagctttcgctgcg

SEQ ID NO: 57695 - DNA, 50 bp, synthetic construct
  source 1..50: mol_type = other DNA
ctgatttacataccactcctcaaagacttgagttatgacaaaaaaaacag

SEQ ID NO: 57696 - DNA, 50 bp, synthetic construct
  source 1..50: mol_type = other DNA
ttttctggaaataataaaacatatttataacttttaatcatcatagacaa

SEQ ID NO: 57697 - DNA, 50 bp, synthetic construct
  source 1..50: mol_type = other DNA
aatgcagtttcatttcgagcttttgacgaagaaaatgatataatcatttt

SEQ ID NO: 57698 - DNA, 50 bp, synthetic construct
  source 1..50: mol_type = other DNA
ttatataaaaataacaccttgcaaggggagcttgctttagaatttcttgc

SEQ ID NO: 57699 - DNA, 50 bp, synthetic construct
  source 1..50: mol_type = other DNA
tacccgagggattttaagtcccttgcattaaacaggttatccatcaagtc

SEQ ID NO: 57700 - DNA, 50 bp, synthetic construct
  source 1..50: mol_type = other DNA
tgagcagtttcgtcggtatctgccgagtaccataacgacgaaatttttag

SEQ ID NO: 57701 - DNA, 50 bp, synthetic construct
  source 1..50: mol_type = other DNA
accgtaaatcctttgacacatctgccaagaaagcccaaagggagggtttg

SEQ ID NO: 57702 - DNA, 50 bp, synthetic construct
  source 1..50: mol_type = other DNA
ttgagtcatatagctcttattaaatattagaaaggagcaatcataatgcc

SEQ ID NO: 57703 - DNA, 50 bp, synthetic construct
  source 1..50: mol_type = other DNA
gataataaaaattcttttgatgaattatacaaaaataaggtataattcta

SEQ ID NO: 57704 - DNA, 50 bp, synthetic construct
  source 1..50: mol_type = other DNA
attcacatattaattatatcccgtcatgccaattcgtatacccatgtgca

SEQ ID NO: 57705 - DNA, 50 bp, synthetic construct
  source 1..50: mol_type = other DNA
gagtcctgtcatcgacaaaatatatatataatttctgcattgggcctata

SEQ ID NO: 57706 - DNA, 50 bp, synthetic construct
  source 1..50: mol_type = other DNA
agcagcataagccataaaaacaccaccttcctttctttttatatagaata

SEQ ID NO: 57707 - DNA, 50 bp, synthetic construct
  source 1..50: mol_type = other DNA
tatagcaaaaatctatcctatcatcacaaatagcatacattttactatta

SEQ ID NO: 57708 - DNA, 50 bp, synthetic construct
  source 1..50: mol_type = other DNA
ccatgatctgcaaactttatcaagcgattcttgaattccctttatcatgg

SEQ ID NO: 57709 - DNA, 50 bp, synthetic construct
  source 1..50: mol_type = other DNA
ctgagctataggcccaatgtaggaatttgtaatccggagcttcagtagtc

SEQ ID NO: 57710 - DNA, 50 bp, synthetic construct
  source 1..50: mol_type = other DNA
cttttttgtcagaattacccttgtaattcgcaataattctatagaaaaag

SEQ ID NO: 57711 - DNA, 50 bp, synthetic construct
  source 1..50: mol_type = other DNA
tgaaagacttcatatcctccgtagttttaaggaggatgattttttatgac

SEQ ID NO: 57712 - DNA, 50 bp, synthetic construct
  source 1..50: mol_type = other DNA
tataatatactacaaacgacatacaggtatatcattattatcgctgtgta

SEQ ID NO: 57713 - DNA, 50 bp, synthetic construct
  source 1..50: mol_type = other DNA
ataaggacagataaactcaggagacccatccaggctttatatgatctctg

SEQ ID NO: 57714 - DNA, 50 bp, synthetic construct
  source 1..50: mol_type = other DNA
tattaactttaagtctagtatttttcaccaagtaataattgaatctgata

SEQ ID NO: 57715 - DNA, 50 bp, synthetic construct
  source 1..50: mol_type = other DNA
ttttcttcggtttcttccgtaaaaatttatggggaagattgtgtaaaaaa

SEQ ID NO: 57716 - DNA, 50 bp, synthetic construct
  source 1..50: mol_type = other DNA
tttcataaccagaaaaagagaaaagtcattcttcctttgactgtaaaaga

SEQ ID NO: 57717 - DNA, 50 bp, synthetic construct
  source 1..50: mol_type = other DNA
cattcttgatgggtatatttttataaataaaacatatgttcaggaggagc

SEQ ID NO: 57718 - DNA, 50 bp, synthetic construct
  source 1..50: mol_type = other DNA
gtgaaatgtgcattcctttcacgaacaaggtctattatagcatatttcct

SEQ ID NO: 57719 - DNA, 50 bp, synthetic construct
  source 1..50: mol_type = other DNA
tagtatcactccctcataaaaatatatgattttggaaacgcaggatttta

SEQ ID NO: 57720 - DNA, 50 bp, synthetic construct
  source 1..50: mol_type = other DNA
catcccaagcagaaatactccctaaacaccctgcatttctgcaaggtgct

SEQ ID NO: 57721 - DNA, 50 bp, synthetic construct
  source 1..50: mol_type = other DNA
caaagaaatccacctgctgacggacgtcaaacagctttctgaccgcttct

SEQ ID NO: 57722 - DNA, 50 bp, synthetic construct
  source 1..50: mol_type = other DNA
ttattgaaaatatattaaataaagaaattttttgaaatgatttgacttaa

SEQ ID NO: 57723 - DNA, 50 bp, synthetic construct
  source 1..50: mol_type = other DNA
tccgtacaatcctatccacacaaaaagctgtgggtctagggttcgaatcc

SEQ ID NO: 57724 - DNA, 50 bp, synthetic construct
  source 1..50: mol_type = other DNA
ttgatgaataattgcttgaataattatttatggaacgcattattcaaaaa

SEQ ID NO: 57725 - DNA, 50 bp, synthetic construct
  source 1..50: mol_type = other DNA
tttcttcgccatgctggcggagcgggcgctccggcaggccgcagaaagga

SEQ ID NO: 57726 - DNA, 50 bp, synthetic construct
  source 1..50: mol_type = other DNA
ctctgtccgctgcctcccgaaaggtccggcacggttcagcgcggacagaa

SEQ ID NO: 57727 - DNA, 50 bp, synthetic construct
  source 1..50: mol_type = other DNA
tgaatctgagcggaaatattttcttgagaaatataagcctgttttcggca

SEQ ID NO: 57728 - DNA, 50 bp, synthetic construct
  source 1..50: mol_type = other DNA
tacaggcataacagatacatgggtaggaggtggcgttcgtgattcctgtt

SEQ ID NO: 57729 - DNA, 50 bp, synthetic construct
  source 1..50: mol_type = other DNA
atgttgtttttttataatttattatgtgcaaaatgcctaaaatgaaagag

SEQ ID NO: 57730 - DNA, 50 bp, synthetic construct
  source 1..50: mol_type = other DNA
tcagcaggccctcggcccgctgcagaagcagcgggggaaattcatgcatt

SEQ ID NO: 57731 - DNA, 50 bp, synthetic construct
  source 1..50: mol_type = other DNA
gtggctaccagcccctctaatcgaggtagataagattagccccgaatagg

SEQ ID NO: 57732 - DNA, 50 bp, synthetic construct
  source 1..50: mol_type = other DNA
tcgaccttcttcttaataccccatttcaccggtattagcggctatattgc

SEQ ID NO: 57733 - DNA, 50 bp, synthetic construct
  source 1..50: mol_type = other DNA
gttttctatatggttgaatgcggcatgccgtgtggctgcatattgccggg

SEQ ID NO: 57734 - DNA, 50 bp, synthetic construct
  source 1..50: mol_type = other DNA
taaagaagttagactctttattcagtccaccaaagatgagcaaaatcata

SEQ ID NO: 57735 - DNA, 50 bp, synthetic construct
  source 1..50: mol_type = other DNA
cgaaatgggtgagtatcgttttgattcgtaaattatacttaaataaatct

SEQ ID NO: 57736 - DNA, 50 bp, synthetic construct
  source 1..50: mol_type = other DNA
ccgtaaaccttcttcagtccgaaaaagcccggggcttcgaagctcgaaga

SEQ ID NO: 57737 - DNA, 50 bp, synthetic construct
  source 1..50: mol_type = other DNA
gctcgaaatggggggcgacaatctgatggttgtcgctcttcctgccgttc

SEQ ID NO: 57738 - DNA, 50 bp, synthetic construct
  source 1..50: mol_type = other DNA
tgcttctgtaagcaggtaccacggccatttgataatccgtccctaccgca

SEQ ID NO: 57739 - DNA, 50 bp, synthetic construct
  source 1..50: mol_type = other DNA
aaagtaaaagacaaatgccttattttaattgattatttaatttttatatt

SEQ ID NO: 57740 - DNA, 50 bp, synthetic construct
  source 1..50: mol_type = other DNA
gtgctaatcgatatgtatcgtgatcgaccagcacacctttccgattcttt

SEQ ID NO: 57741 - DNA, 50 bp, synthetic construct
  source 1..50: mol_type = other DNA
caaactattgacgaggaaggccaaccagaacccgagcagccaatcgttct

SEQ ID NO: 57742 - DNA, 50 bp, synthetic construct
  source 1..50: mol_type = other DNA
cgaacagccgacggcgtattgagcatcaagccataggtgtcggccttgtt

SEQ ID NO: 57743 - DNA, 50 bp, synthetic construct
  source 1..50: mol_type = other DNA
gaccttgccatcacgactgtgctggtttaaacatctctgagggtgagtta

SEQ ID NO: 57744 - DNA, 50 bp, synthetic construct
  source 1..50: mol_type = other DNA
tttttggcgtaattgaccttaatttaaatgagaatcaattgcatgggagt

SEQ ID NO: 57745 - DNA, 50 bp, synthetic construct
  source 1..50: mol_type = other DNA
caaagctaattcattgctaagactcttgtctttaaatgaaaggagctatg

SEQ ID NO: 57746 - DNA, 50 bp, synthetic construct
  source 1..50: mol_type = other DNA
tattccacctttcaatttgttgttaaaccaaatataatactagctgaatt

SEQ ID NO: 57747 - DNA, 50 bp, synthetic construct
  source 1..50: mol_type = other DNA
ttttgaaaacataactgaattgggaatccaattcaattgtattaataaac

SEQ ID NO: 57748 - DNA, 50 bp, synthetic construct
  source 1..50: mol_type = other DNA
gttgcgtgcgcgcagaatctgggctagcctatatgacccgtacagatgaa

SEQ ID NO: 57749 - DNA, 50 bp, synthetic construct
  source 1..50: mol_type = other DNA
agctttggaagtcgacctatcccaattggaatagtgtgacatccaaatta

SEQ ID NO: 57750 - DNA, 50 bp, synthetic construct
  source 1..50: mol_type = other DNA
atcgaactctcatgatcctctcggaagcaggaggaagctgaggcgaagat

SEQ ID NO: 57751 - DNA, 50 bp, synthetic construct
  source 1..50: mol_type = other DNA
cggcgtgatcgttctcgtcaatgatgccagtaatcctgacgaccaccgaa

SEQ ID NO: 57752 - DNA, 50 bp, synthetic construct
  source 1..50: mol_type = other DNA
aatgagctgaaattagatgatatacacatataatctaatgaggttggagg

SEQ ID NO: 57753 - DNA, 50 bp, synthetic construct
  source 1..50: mol_type = other DNA
catgtttttcgactgctcgatgtagcgctttcgggcagccgagggatact

SEQ ID NO: 57754 - DNA, 50 bp, synthetic construct
  source 1..50: mol_type = other DNA
catctgtgttaattaaactacttgtacaagttcttcaattaaaagcttac

SEQ ID NO: 57755 - DNA, 50 bp, synthetic construct
  source 1..50: mol_type = other DNA
cctttgcgccggtccggcccgccgtacggcggcggcgagagccgcacggt

SEQ ID NO: 57756 - DNA, 50 bp, synthetic construct
  source 1..50: mol_type = other DNA
actttcagcatctcggctccgttgtcaacaggagacgagactatgaaaaa

SEQ ID NO: 57757 - DNA, 50 bp, synthetic construct
  source 1..50: mol_type = other DNA
gagtttacaccctatgagcccacagatataaactgtttgggtgtaggtga

SEQ ID NO: 57758 - DNA, 50 bp, synthetic construct
  source 1..50: mol_type = other DNA
gcgcgaacggccctgaggcgcgtcggagcccgcctggaggccagtgtgaa

SEQ ID NO: 57759 - DNA, 50 bp, synthetic construct
  source 1..50: mol_type = other DNA
tcggcaagctctgggacaccgccccggggacgaacggcaggccttgagcc

SEQ ID NO: 57760 - DNA, 50 bp, synthetic construct
  source 1..50: mol_type = other DNA
cgcgtagaacatcagagaccgcccaaggagaacgtctgattcatgaaagc

SEQ ID NO: 57761 - DNA, 50 bp, synthetic construct
  source 1..50: mol_type = other DNA
tcgggcgtgtagtggaacaattgatggaaaatgttcgactactgagccga

SEQ ID NO: 57762 - DNA, 50 bp, synthetic construct
  source 1..50: mol_type = other DNA
agtgagtcgctccggctttttaaaaggttattaacaacagcttactcagc

SEQ ID NO: 57763 - DNA, 50 bp, synthetic construct
  source 1..50: mol_type = other DNA
ccaatatttttcaaatagtcttgtttgatatttagttttaaaaatatcgt

SEQ ID NO: 57764 - DNA, 50 bp, synthetic construct
  source 1..50: mol_type = other DNA
accacctgattatgcttgattttacataaaacaattcttctgcatttgta

SEQ ID NO: 57765 - DNA, 50 bp, synthetic construct
  source 1..50: mol_type = other DNA
acgagcagcgccgcggcaaaccgccttcgcaacgcggcggcggaaagcag

SEQ ID NO: 57766 - DNA, 50 bp, synthetic construct
  source 1..50: mol_type = other DNA
ccagcgccgtttcttttttcagttcgatgctgatagggaaacgcgattgc

SEQ ID NO: 57767 - DNA, 50 bp, synthetic construct
  source 1..50: mol_type = other DNA
tgaggatcaaaagactgcctccggcggcgtcggaatcgagcgaatcgttg

SEQ ID NO: 57768 - DNA, 50 bp, synthetic construct
  source 1..50: mol_type = other DNA
gagaggtagggattttttttatttgcaaataaaatcaatatcctaaaaaa

SEQ ID NO: 57769 - DNA, 50 bp, synthetic construct
  source 1..50: mol_type = other DNA
tggcagcatttcggccagccgaagcgccgagctcggcgtgacggatgccg

SEQ ID NO: 57770 - DNA, 50 bp, synthetic construct
  source 1..50: mol_type = other DNA
acaaaccaaaagaaatgtaaaataaatttttgttcattattttctgttga

SEQ ID NO: 57771 - DNA, 50 bp, synthetic construct
  source 1..50: mol_type = other DNA
tggacgccccgggttcggaactgcgcccagttccgcgggctccgcgtctg

SEQ ID NO: 57772 - DNA, 50 bp, synthetic construct
  source 1..50: mol_type = other DNA
gctgataacagggcacgctgcgggcgtccgcatgtcgaccgatatccagc

SEQ ID NO: 57773 - DNA, 50 bp, synthetic construct
  source 1..50: mol_type = other DNA
tatttttgacgcccgacagggcggccagttcctgcatggcgttgaatctc

SEQ ID NO: 57774 - DNA, 50 bp, synthetic construct
  source 1..50: mol_type = other DNA
tcatggacgatctgggatcgcccagcgctggccgcccacctccagcgtgt

SEQ ID NO: 57775 - DNA, 50 bp, synthetic construct
  source 1..50: mol_type = other DNA
gggccggacctaaaattgtgtcactagtgacacaatttcaccgccgatac

SEQ ID NO: 57776 - DNA, 50 bp, synthetic construct
  source 1..50: mol_type = other DNA
aaatccgaaaattaaaaataaaactagatttattcctaacttaatgattg

SEQ ID NO: 57777 - DNA, 50 bp, synthetic construct
  source 1..50: mol_type = other DNA
tcggtccgcccggcaccggcaagtcccgccggcgcgggcgggcgccacga

SEQ ID NO: 57778 - DNA, 50 bp, synthetic construct
  source 1..50: mol_type = other DNA
ttaattccattccccgcagccttccggccgactgcaggttcgcacgttgt

SEQ ID NO: 57779 - DNA, 50 bp, synthetic construct
  source 1..50: mol_type = other DNA
atcgacagagcggcgtcgctcggctcgacgagcgctttcgggcacccgag

SEQ ID NO: 57780 - DNA, 50 bp, synthetic construct
  source 1..50: mol_type = other DNA
cgagcgcatcaagcccggtcacccgccatggatgcagatcgctgcgagaa

SEQ ID NO: 57781 - DNA, 50 bp, synthetic construct
  source 1..50: mol_type = other DNA
actttttctttttcctccacataatattaaaaggaggaatactatgaaaa

SEQ ID NO: 57782 - DNA, 50 bp, synthetic construct
  source 1..50: mol_type = other DNA
aatatcctattaaagaaaaaatccagcttttccatcttcaattctatatc

SEQ ID NO: 57783 - DNA, 50 bp, synthetic construct
  source 1..50: mol_type = other DNA
tcgcatcggcactgcgcagcaaggcaggcggcgcaggagtgctatgcaga

SEQ ID NO: 57784 - DNA, 50 bp, synthetic construct
  source 1..50: mol_type = other DNA
cgcgcctccgcttcgatgacgtcgatcaaggtcagatcagcatgatagcg

SEQ ID NO: 57785 - DNA, 50 bp, synthetic construct
  source 1..50: mol_type = other DNA
gatcccggccagcgccgaatatttcgaggcgctgtgtttgacgcgggatg

SEQ ID NO: 57786 - DNA, 50 bp, synthetic construct
  source 1..50: mol_type = other DNA
tttattgttgtgttaacgagactatattatctatatgttgttacaagacc

SEQ ID NO: 57787 - DNA, 50 bp, synthetic construct
  source 1..50: mol_type = other DNA
ttttagttcttgcaatcttcatttaaccaaggagaaagcaataaccgacc

SEQ ID NO: 57788 - DNA, 50 bp, synthetic construct
  source 1..50: mol_type = other DNA
taagaaactcagtttcatttttacatccaaaacctaacaatagtttcttt

SEQ ID NO: 57789 - DNA, 50 bp, synthetic construct
  source 1..50: mol_type = other DNA
ttcaattttcaaagaacgattcatttcagcaacaatcattgaaagaccaa

SEQ ID NO: 57790 - DNA, 50 bp, synthetic construct
  source 1..50: mol_type = other DNA
atacaaaggggatgccttattacaaaattacttggctgattacttgatat

SEQ ID NO: 57791 - DNA, 50 bp, synthetic construct
  source 1..50: mol_type = other DNA
acatttagaaatcgcattcatgatataccgtgaaggctatatcacaaagc

SEQ ID NO: 57792 - DNA, 50 bp, synthetic construct
  source 1..50: mol_type = other DNA
aagattcttttccttcattttagaaatttttgctgaacaaaaagaacatc

SEQ ID NO: 57793 - DNA, 50 bp, synthetic construct
  source 1..50: mol_type = other DNA
ctcacccctttctttggtagtaacatgtgccttataaagaatatcttctg

SEQ ID NO: 57794 - DNA, 50 bp, synthetic construct
  source 1..50: mol_type = other DNA
tgaaggatggggcaaaatacgaggttaaaagatttagacctattctttca

SEQ ID NO: 57795 - DNA, 50 bp, synthetic construct
  source 1..50: mol_type = other DNA
cgcgcggcgctcgacgacgacgcgcgggtgtgttcttcgtcggctatgcg

SEQ ID NO: 57796 - DNA, 50 bp, synthetic construct
  source 1..50: mol_type = other DNA
cgagttgtcttatagttgcttgaatctacaagcacttacgatcgaactcg

SEQ ID NO: 57797 - DNA, 50 bp, synthetic construct
  source 1..50: mol_type = other DNA
ccacttaatcatattagtgatagaagtaaatcaatagttatatttgaaaa

SEQ ID NO: 57798 - DNA, 50 bp, synthetic construct
  source 1..50: mol_type = other DNA
agctggcgctttgaactataaaaacagttttttgccaatgagcgctcata

SEQ ID NO: 57799 - DNA, 50 bp, synthetic construct
  source 1..50: mol_type = other DNA
tatacatgtcaacgataatacaaaatttattattttacttggtatttata

SEQ ID NO: 57800 - DNA, 50 bp, synthetic construct
  source 1..50: mol_type = other DNA
ccatgttatacacctccaaaaagataatttcccgattttgaataatagta

SEQ ID NO: 57801 - DNA, 50 bp, synthetic construct
  source 1..50: mol_type = other DNA
accggccaccaaacgcctgcacacgcgtgtttccgcttgtcagcgcgcga

SEQ ID NO: 57802 - DNA, 50 bp, synthetic construct
  source 1..50: mol_type = other DNA
gcgctccaccatttgaggagacgtgcagaggagaggaagtaatggctcgc

SEQ ID NO: 57803 - DNA, 50 bp, synthetic construct
  source 1..50: mol_type = other DNA
cacatttgaaatagttgcgaccagggctgggaccacgttctttaaatgtg

SEQ ID NO: 57804 - DNA, 50 bp, synthetic construct
  source 1..50: mol_type = other DNA
tgaaacagaaagaagccgcgagttattaaaaatggcttctttgattagag

SEQ ID NO: 57805 - DNA, 50 bp, synthetic construct
  source 1..50: mol_type = other DNA
aaagtaactaaagtacaaaaacaaaattttttcagtaattatttacttct

SEQ ID NO: 57806 - DNA, 50 bp, synthetic construct
  source 1..50: mol_type = other DNA
ttaaaactaatttttttcatattatttactatgaaaattggtatttatat

SEQ ID NO: 57807 - DNA, 50 bp, synthetic construct
  source 1..50: mol_type = other DNA
attttttagttaattatatacacacctgtacctttatttgacttttccat

SEQ ID NO: 57808 - DNA, 50 bp, synthetic construct
  source 1..50: mol_type = other DNA
ttaaacattcctccaagctataaaaagtttaagaaaggagtaataaaaaa

SEQ ID NO: 57809 - DNA, 50 bp, synthetic construct
  source 1..50: mol_type = other DNA
gccttaaaacttctagggtttttttagaaaaaccattttggtggttaggc

SEQ ID NO: 57810 - DNA, 50 bp, synthetic construct
  source 1..50: mol_type = other DNA
tcgcgaccgtttccagcgcgagctcgtcaaggcgctggcacgccaccagg

SEQ ID NO: 57811 - DNA, 50 bp, synthetic construct
  source 1..50: mol_type = other DNA
gattgaattctcgccagtgattcgacttggcattacacgaaaattcaaga

SEQ ID NO: 57812 - DNA, 50 bp, synthetic construct
  source 1..50: mol_type = other DNA
tcatttgccgttttaactctcactacaaggacggttaaggcggcaaatca

SEQ ID NO: 57813 - DNA, 50 bp, synthetic construct
  source 1..50: mol_type = other DNA
tttctttatagttttaaagttggttattcattgctatttaattgaagaaa

SEQ ID NO: 57814 - DNA, 50 bp, synthetic construct
  source 1..50: mol_type = other DNA
aaattatgaacaaaaaaatagcgatcatttgctttttttgagaataattc

SEQ ID NO: 57815 - DNA, 50 bp, synthetic construct
  source 1..50: mol_type = other DNA
ttttaaaatatttttgtatctattaatatagtatgaaagggatgttaaat

SEQ ID NO: 57816 - DNA, 50 bp, synthetic construct
  source 1..50: mol_type = other DNA
atacagcttaaataaaactattgtcaacaaaatctttatttgcattttat

SEQ ID NO: 57817 - DNA, 50 bp, synthetic construct
  source 1..50: mol_type = other DNA
tggtagagcagttatcgatgaagaaagattggactgacagtgatcttcca

SEQ ID NO: 57818 - DNA, 50 bp, synthetic construct
  source 1..50: mol_type = other DNA
tttaacgaagaattgaaaagtaaaaagaagtttaccataggacaagtaat

SEQ ID NO: 57819 - DNA, 50 bp, synthetic construct
  source 1..50: mol_type = other DNA
tcattagtctggtaaatacttgggtaaagaagcatgggatataataacag

SEQ ID NO: 57820 - DNA, 50 bp, synthetic construct
  source 1..50: mol_type = other DNA
gttttgcaaagggtacgcatggcaaatgccatgcgtgataattgcaatta

SEQ ID NO: 57821 - DNA, 50 bp, synthetic construct
  source 1..50: mol_type = other DNA
tttagtacatattttttatcatcttgatctgctaaattatgcttaatatg

SEQ ID NO: 57822 - DNA, 50 bp, synthetic construct
  source 1..50: mol_type = other DNA
ccgtcggaccccggtctcgcagaggcctcgatcatgcccgaagcgcgcca

SEQ ID NO: 57823 - DNA, 50 bp, synthetic construct
  source 1..50: mol_type = other DNA
cacgcatcgcgatcggccggatcgcgcgtccgcgccgatcgcgtcgccga

SEQ ID NO: 57824 - DNA, 50 bp, synthetic construct
  source 1..50: mol_type = other DNA
tgtaaataaaatagaacctgctgtaaaccaatttatctaccttatctatt

SEQ ID NO: 57825 - DNA, 50 bp, synthetic construct
  source 1..50: mol_type = other DNA
cccctttttatgtctcaataagtgcccttctgatgaaatagtcaaaggct

SEQ ID NO: 57826 - DNA, 50 bp, synthetic construct
  source 1..50: mol_type = other DNA
ttaattttgtctgaaatggaatctgtagaatatggctcagaaattataca

SEQ ID NO: 57827 - DNA, 50 bp, synthetic construct
  source 1..50: mol_type = other DNA
tcttcgcctccaggccctcgcggtcgaccccaagcagattcactatcgct

SEQ ID NO: 57828 - DNA, 50 bp, synthetic construct
  source 1..50: mol_type = other DNA
ccctcaacggtcgccaccccccgcttaaccggccagattacgaccagata

SEQ ID NO: 57829 - DNA, 50 bp, synthetic construct
  source 1..50: mol_type = other DNA
tgtcgcaatacaatacgtcatgctcattcatgacttatagtattgcgaca

SEQ ID NO: 57830 - DNA, 50 bp, synthetic construct
  source 1..50: mol_type = other DNA
tcccgtctcggcttcatggtcctcgcgaggacgtcttcgccgcgttcgcg

SEQ ID NO: 57831 - DNA, 50 bp, synthetic construct
  source 1..50: mol_type = other DNA
cccaaagctactctaaagagcagatatatttgaattcttgtgataatgtg

SEQ ID NO: 57832 - DNA, 50 bp, synthetic construct
  source 1..50: mol_type = other DNA
atggttcgtaagatcacaaagtatcataaatttgtataatttctaatact

SEQ ID NO: 57833 - DNA, 50 bp, synthetic construct
  source 1..50: mol_type = other DNA
agtacctattctgcatgtataaaaaattttatcaatgaggaggtactact

SEQ ID NO: 57834 - DNA, 50 bp, synthetic construct
  source 1..50: mol_type = other DNA
gccggttttcttgaggtgctcatagatagatttatctcatggaaacagga

SEQ ID NO: 57835 - DNA, 50 bp, synthetic construct
  source 1..50: mol_type = other DNA
ttgcactaccctgccggtcctgatatagcaccaccggctaagatgacaag

SEQ ID NO: 57836 - DNA, 50 bp, synthetic construct
  source 1..50: mol_type = other DNA
ggtgattttcttggccatgcttttctaaaccaagagaaaagaaaaacatg

SEQ ID NO: 57837 - DNA, 50 bp, synthetic construct
  source 1..50: mol_type = other DNA
atacagattgcctccaacactgtttgaactggtatgacgagaagttcatg

SEQ ID NO: 57838 - DNA, 50 bp, synthetic construct
  source 1..50: mol_type = other DNA
cgtttcaatttagatgataaatgatagtctttatcccagtatatgaagcg

SEQ ID NO: 57839 - DNA, 50 bp, synthetic construct
  source 1..50: mol_type = other DNA
ccctggcagaaaattggttaaaatcactgcctcttcatttttagccagac

SEQ ID NO: 57840 - DNA, 50 bp, synthetic construct
  source 1..50: mol_type = other DNA
ttcaatgaggctgtacagatactctgccttagccataaagtcactttgtt

SEQ ID NO: 57841 - DNA, 50 bp, synthetic construct
  source 1..50: mol_type = other DNA
agaagtacagatttataggaggcagcaaccgctcttaattctgtatccgt

SEQ ID NO: 57842 - DNA, 50 bp, synthetic construct
  source 1..50: mol_type = other DNA
ccgaaggccgaaaaagagagggccatcacaattcagttttcggccttcgg

SEQ ID NO: 57843 - DNA, 50 bp, synthetic construct
  source 1..50: mol_type = other DNA
ctgaatatccgccggcatggcgggcgcagcctctgcaggcggaacaccgg

SEQ ID NO: 57844 - DNA, 50 bp, synthetic construct
  source 1..50: mol_type = other DNA
gcgcacttccaccgcgtgcgtcgcgcgagcggaactcgctggcccagcgc

SEQ ID NO: 57845 - DNA, 50 bp, synthetic construct
  source 1..50: mol_type = other DNA
attaatgggtcacacaccctatggatcaatggattggctcatgattcatc

SEQ ID NO: 57846 - DNA, 50 bp, synthetic construct
  source 1..50: mol_type = other DNA
acgaggacatcgcggccgaggagaaaacggatcggcattcatgtcttcgt

SEQ ID NO: 57847 - DNA, 50 bp, synthetic construct
  source 1..50: mol_type = other DNA
tcctcatatgaaaagcttgaagccggcagataaaaaatgatattggagga

SEQ ID NO: 57848 - DNA, 50 bp, synthetic construct
  source 1..50: mol_type = other DNA
gatacttattgcggcgataggccatgcggcttattctcgtggagcagatt

SEQ ID NO: 57849 - DNA, 50 bp, synthetic construct
  source 1..50: mol_type = other DNA
agcaggatcgctgcatgcgagagatcgaattcgaaggtgtctgagctcaa

SEQ ID NO: 57850 - DNA, 50 bp, synthetic construct
  source 1..50: mol_type = other DNA
tcatctccatcgaataattccataaaagaagaattaaaagatttctttag

SEQ ID NO: 57851 - DNA, 50 bp, synthetic construct
  source 1..50: mol_type = other DNA
atcgagttcgtcgccgcggacgaggccttctcggcggcgacgagcacggc

SEQ ID NO: 57852 - DNA, 50 bp, synthetic construct
  source 1..50: mol_type = other DNA
taattcatagtccttacctttgtataccgaagtataactacatgttattg

SEQ ID NO: 57853 - DNA, 50 bp, synthetic construct
  source 1..50: mol_type = other DNA
acgagatgaatgggcaacttgaggccggtccggttgccctaggctacgga

SEQ ID NO: 57854 - DNA, 50 bp, synthetic construct
  source 1..50: mol_type = other DNA
ttcatcctcctgtatttatataaattgaatttgaaatttttgaggatgaa

SEQ ID NO: 57855 - DNA, 50 bp, synthetic construct
  source 1..50: mol_type = other DNA
agaatttaaataaaaactccctcagtagagggagttgatagtcaatgatt

SEQ ID NO: 57856 - DNA, 50 bp, synthetic construct
  source 1..50: mol_type = other DNA
gcaatgtcgagaagctgggcgcggcgcgatgccgtcgcgcgggacattgc

SEQ ID NO: 57857 - DNA, 50 bp, synthetic construct
  source 1..50: mol_type = other DNA
acccccttatataaaatgataacaataaagaaatttaaataataggaggt

SEQ ID NO: 57858 - DNA, 50 bp, synthetic construct
  source 1..50: mol_type = other DNA
gccaaagctaactcctcccatctaattacatgcacaaaattataaaatat

SEQ ID NO: 57859 - DNA, 50 bp, synthetic construct
  source 1..50: mol_type = other DNA
tagctatgttaactctaactttgatagtaaagttagttaaaaaatttata

SEQ ID NO: 57860 - DNA, 50 bp, synthetic construct
  source 1..50: mol_type = other DNA
ctctttttacggagagggcgcggtggtgtccgccctctcacacaaaaaca

SEQ ID NO: 57861 - DNA, 50 bp, synthetic construct
  source 1..50: mol_type = other DNA
cccacagccccatccggtcggatgagcatccggctccatcacatgcaggt

SEQ ID NO: 57862 - DNA, 50 bp, synthetic construct
  source 1..50: mol_type = other DNA
ggcggcgcaggtcgacggacgcgtgggcgcgcccgccgcgcttgcccgcg

SEQ ID NO: 57863 - DNA, 50 bp, synthetic construct
  source 1..50: mol_type = other DNA
tatacaggtgcagaggatttatgatatagtaaaggccgagtccgatcaga

SEQ ID NO: 57864 - DNA, 50 bp, synthetic construct
  source 1..50: mol_type = other DNA
gggctgggggctgggcatcgcgcgtcgccgccatgcccgcgccacaggcg

SEQ ID NO: 57865 - DNA, 50 bp, synthetic construct
  source 1..50: mol_type = other DNA
cggattttccataagccccaggatgaatggtttcaattaagggaaagtac

SEQ ID NO: 57866 - DNA, 50 bp, synthetic construct
  source 1..50: mol_type = other DNA
gaaccctgtcaaatcttcttcatgacgatgaatatgatttagcagatcca

SEQ ID NO: 57867 - DNA, 50 bp, synthetic construct
  source 1..50: mol_type = other DNA
ctttatagttttaaagttggttattaataaccaatgaatatttgataaat

SEQ ID NO: 57868 - DNA, 50 bp, synthetic construct
  source 1..50: mol_type = other DNA
tgagcgacgcgtccagctgcatttcacgaccagcggcagcgcgtcgccga

SEQ ID NO: 57869 - DNA, 50 bp, synthetic construct
  source 1..50: mol_type = other DNA
acataaaagagaattttatatgtgtacacataaattatataaggaaattt

SEQ ID NO: 57870 - DNA, 50 bp, synthetic construct
  source 1..50: mol_type = other DNA
tgaacttaaaagtttatacagaaaaacatcttgataaaacaaaaaattaa

SEQ ID NO: 57871 - DNA, 50 bp, synthetic construct
  source 1..50: mol_type = other DNA
ttatgattgctgctgaccactatctagagaggggaatcaagcatgcgtgt

SEQ ID NO: 57872 - DNA, 50 bp, synthetic construct
  source 1..50: mol_type = other DNA
tagggaggtgcgtaactcaaaagatatctttcttttcatcgcattcaatt

SEQ ID NO: 57873 - DNA, 50 bp, synthetic construct
  source 1..50: mol_type = other DNA
aattcactctttagtgccgcaatttcatttccgccactattagctgagtt

SEQ ID NO: 57874 - DNA, 50 bp, synthetic construct
  source 1..50: mol_type = other DNA
atttcatcactttccttttttaaaattatcaagaagtactcggatgatgc

SEQ ID NO: 57875 - DNA, 50 bp, synthetic construct
  source 1..50: mol_type = other DNA
gctgactcggctgcagacacgaatcgcggccggtgaactactcattcata

SEQ ID NO: 57876 - DNA, 50 bp, synthetic construct
  source 1..50: mol_type = other DNA
ttcagtttctttctcagtaccgcgataggcaaactgaaaaaggtagtcct

SEQ ID NO: 57877 - DNA, 50 bp, synthetic construct
  source 1..50: mol_type = other DNA
tgttatctgagcttgcttatttgatttcaaataaacaacaaataatattt

SEQ ID NO: 57878 - DNA, 50 bp, synthetic construct
  source 1..50: mol_type = other DNA
taaagttttcatccattttttcatttaagaaaaaaaccattgaagcttct

SEQ ID NO: 57879 - DNA, 50 bp, synthetic construct
  source 1..50: mol_type = other DNA
aagaaaaaagtttgtgtaatgttcatatactttatacaaacttttttgag

SEQ ID NO: 57880 - DNA, 50 bp, synthetic construct
  source 1..50: mol_type = other DNA
ttttgggttaaaggaacattgactctagtgagtgttatattaacccaaaa

SEQ ID NO: 57881 - DNA, 50 bp, synthetic construct
  source 1..50: mol_type = other DNA
actaaatttctatatcatatgttttataaatggtgcctatagttgttaga

SEQ ID NO: 57882 - DNA, 50 bp, synthetic construct
  source 1..50: mol_type = other DNA
ttcagggggtgtcgaacgaactaatttatcgagaggcgggggcgccttga

SEQ ID NO: 57883 - DNA, 50 bp, synthetic construct
  source 1..50: mol_type = other DNA
catatacaactaacttatcaaaagtacttttttctgaaataactgatatg

SEQ ID NO: 57884 - DNA, 50 bp, synthetic construct
  source 1..50: mol_type = other DNA
ttatagatggaaaagcagtggttgatcataaccacctaaatcaaataaaa

SEQ ID NO: 57885 - DNA, 50 bp, synthetic construct
  source 1..50: mol_type = other DNA
ttttttgtttgataaatattattaaaatataaacttcctcagccagcaaa

SEQ ID NO: 57886 - DNA, 50 bp, synthetic construct
  source 1..50: mol_type = other DNA
tcttatctaagttcccatatttaattttgaaagtggcaatttacagtaga

SEQ ID NO: 57887 - DNA, 50 bp, synthetic construct
  source 1..50: mol_type = other DNA
tgtttaataagtcctattattattaaaataattatgtatattacatgaca

SEQ ID NO: 57888 - DNA, 50 bp, synthetic construct
  source 1..50: mol_type = other DNA
ttaatgttccatttagtagcactaattagtgctaccacgtgttataatac

SEQ ID NO: 57889 - DNA, 50 bp, synthetic construct
  source 1..50: mol_type = other DNA
gaagagtatgacgttatttgaagaattcttgtgatctatacaacaaaata

SEQ ID NO: 57890 - DNA, 50 bp, synthetic construct
  source 1..50: mol_type = other DNA
aaatatccgataattacataataaggttatcggcgtactcacggatattt

SEQ ID NO: 57891 - DNA, 50 bp, synthetic construct
  source 1..50: mol_type = other DNA
tgaaccaattatttctaaagatgaattcaccttaaaggtaaattggtttg

SEQ ID NO: 57892 - DNA, 50 bp, synthetic construct
  source 1..50: mol_type = other DNA
aacacttactatttttcttgataataaacttttgactgctgataaaaatg

SEQ ID NO: 57893 - DNA, 50 bp, synthetic construct
  source 1..50: mol_type = other DNA
attccaggctgctgttgtgttgctcctgcaattgtgcagcagcggcgaca

SEQ ID NO: 57894 - DNA, 50 bp, synthetic construct
  source 1..50: mol_type = other DNA
ccaaaggtaaagtagtagcttctaatataaagctaaagagctaccattac

SEQ ID NO: 57895 - DNA, 50 bp, synthetic construct
  source 1..50: mol_type = other DNA
agaaaatatagctactgcaactgatttcaatataagtcattatattgttt

SEQ ID NO: 57896 - DNA, 50 bp, synthetic construct
  source 1..50: mol_type = other DNA
gcttggtaattgatgtagttgtagacccacaactagcccaagtaagccga

SEQ ID NO: 57897 - DNA, 50 bp, synthetic construct
  source 1..50: mol_type = other DNA
atgaggcgccgtcctccgccgccacattgggagggcggacggccgtgacg

SEQ ID NO: 57898 - DNA, 50 bp, synthetic construct
  source 1..50: mol_type = other DNA
ggtccccgcagcatgaccgacattgaactgccgaggatgctgcggggatg

SEQ ID NO: 57899 - DNA, 50 bp, synthetic construct
  source 1..50: mol_type = other DNA
attttgttattcagtgatctccatcaatggataaagtcaaatatccaaca

SEQ ID NO: 57900 - DNA, 50 bp, synthetic construct
  source 1..50: mol_type = other DNA
atggtaagaccggaacgattgacgatgatgtctagaagtaatcgtaacat

SEQ ID NO: 57901 - DNA, 50 bp, synthetic construct
  source 1..50: mol_type = other DNA
tctgctcgtccaggtagttcatagaagtagctataacatgggcagaaatg

SEQ ID NO: 57902 - DNA, 50 bp, synthetic construct
  source 1..50: mol_type = other DNA
ccccgaccgggtcttcgtcgcgaccggcagcgaggacgagtcgagccgca

SEQ ID NO: 57903 - DNA, 50 bp, synthetic construct
  source 1..50: mol_type = other DNA
tgcagtgccctgacaattcgtactgcaacatgaaagctccttgcatgact

SEQ ID NO: 57904 - DNA, 50 bp, synthetic construct
  source 1..50: mol_type = other DNA
taaaattggaatagaacatatgttcttttcgatgttcgctaagttatttt

SEQ ID NO: 57905 - DNA, 50 bp, synthetic construct
  source 1..50: mol_type = other DNA
tcatgcttatctgaaggtgcttgtccccaagcttaatcagctcgacaacc

SEQ ID NO: 57906 - DNA, 50 bp, synthetic construct
  source 1..50: mol_type = other DNA
gaatataatataacgaatctatataaatatatattatctatatgttgtta

SEQ ID NO: 57907 - DNA, 50 bp, synthetic construct
  source 1..50: mol_type = other DNA
aatttctttaaattcgctcatcaaattttttgtgctatttttcaagacgt

SEQ ID NO: 57908 - DNA, 50 bp, synthetic construct
  source 1..50: mol_type = other DNA
tcccaagtgaattttgaccgttactcgtaacaaatcaaaaggactaatca

SEQ ID NO: 57909 - DNA, 50 bp, synthetic construct
  source 1..50: mol_type = other DNA
ttcatctgccttagctaccacatgattttgcctaaacgtaggcagatcac

SEQ ID NO: 57910 - DNA, 50 bp, synthetic construct
  source 1..50: mol_type = other DNA
catgtacaatcacagcctttcctttaaaccaaaacccaagtccctacctg

SEQ ID NO: 57911 - DNA, 50 bp, synthetic construct
  source 1..50: mol_type = other DNA
tacctatgaacacactattcagtctatatacaacaggacaggcataggta

SEQ ID NO: 57912 - DNA, 50 bp, synthetic construct
  source 1..50: mol_type = other DNA
ttctagtatgaatcggccttgatttaaatagcgatggatttgaactgaat

SEQ ID NO: 57913 - DNA, 50 bp, synthetic construct
  source 1..50: mol_type = other DNA
caagaagttgtgaggtcagttcatggatggcctgatctctctgtccacta

SEQ ID NO: 57914 - DNA, 50 bp, synthetic construct
  source 1..50: mol_type = other DNA
tcttgaattttcgtgtaatgccaagtcgaatcgctggcgagaattcaatc

SEQ ID NO: 57915 - DNA, 50 bp, synthetic construct
  source 1..50: mol_type = other DNA
caggtgtagagacatcaagtttgcttccaagtctgatttcttcacagctt

SEQ ID NO: 57916 - DNA, 50 bp, synthetic construct
  source 1..50: mol_type = other DNA
gaattgaagatggaaaggctgttgtaatgagtcgttagattcttttattc

SEQ ID NO: 57917 - DNA, 50 bp, synthetic construct
  source 1..50: mol_type = other DNA
tttttatgagtaaatacaaattagttgtcctttagattgactgtcaataa

SEQ ID NO: 57918 - DNA, 50 bp, synthetic construct
  source 1..50: mol_type = other DNA
cctatctcgatcctccggggcttcatcgagaaggcgatcggcacgatcac

SEQ ID NO: 57919 - DNA, 50 bp, synthetic construct
  source 1..50: mol_type = other DNA
taaattttcaagagaagaaaaaagaattaatgttttcaatgtaaaatatt

SEQ ID NO: 57920 - DNA, 50 bp, synthetic construct
  source 1..50: mol_type = other DNA
tttaaatatttttgaattcaattcatcataactctttaaaaatatataaa

SEQ ID NO: 57921 - DNA, 50 bp, synthetic construct
  source 1..50: mol_type = other DNA
tggcaaaggaatcgatccaggcgctggctggtggaacaaagccattgcaa

SEQ ID NO: 57922 - DNA, 50 bp, synthetic construct
  source 1..50: mol_type = other DNA
aatgattaattacaataaaaaattattcttcttaaagtaatggaagcgtt

SEQ ID NO: 57923 - DNA, 50 bp, synthetic construct
  source 1..50: mol_type = other DNA
ccatatatcactctgaagccctgaataaaagtctaatttttaatatatga

SEQ ID NO: 57924 - DNA, 50 bp, synthetic construct
  source 1..50: mol_type = other DNA
ttaaaaatggcaaagcaatagtggatcctctgtaaattttcctttttcaa

SEQ ID NO: 57925 - DNA, 50 bp, synthetic construct
  source 1..50: mol_type = other DNA
agccattccggaataatcgtaacaaatgtcacgatcattccggcacgaac

SEQ ID NO: 57926 - DNA, 50 bp, synthetic construct
  source 1..50: mol_type = other DNA
taggcatgttgaatgatatatccgataggaggcatcataatggaaaaaaa

SEQ ID NO: 57927 - DNA, 50 bp, synthetic construct
  source 1..50: mol_type = other DNA
gctgaaatggatcatcgtatagattatgctgtgcgataatccacacaggg

SEQ ID NO: 57928 - DNA, 50 bp, synthetic construct
  source 1..50: mol_type = other DNA
ttttgctgatgaaattaatattgatgccgttttgaatgatatatccaaaa

SEQ ID NO: 57929 - DNA, 50 bp, synthetic construct
  source 1..50: mol_type = other DNA
ctgcttgaatggattatcatatttctcctccacattataatttctttatc

SEQ ID NO: 57930 - DNA, 50 bp, synthetic construct
  source 1..50: mol_type = other DNA
aggttaattattatactaattatataaaaacaacatatagtgatccatca

SEQ ID NO: 57931 - DNA, 50 bp, synthetic construct
  source 1..50: mol_type = other DNA
ttatgggtttatataaaaattattaaatggcagcctattgcagagtatca

SEQ ID NO: 57932 - DNA, 50 bp, synthetic construct
  source 1..50: mol_type = other DNA
tcagcaaattcttttaaagcatactgggtggctttaaaaatattgataac

SEQ ID NO: 57933 - DNA, 50 bp, synthetic construct
  source 1..50: mol_type = other DNA
aaaaatactggtgaaaaaatattttaatttattaaaacccaatcattcgg

SEQ ID NO: 57934 - DNA, 50 bp, synthetic construct
  source 1..50: mol_type = other DNA
atctgatttatttggcactattatttataagagttttgaataaaagggtg

SEQ ID NO: 57935 - DNA, 50 bp, synthetic construct
  source 1..50: mol_type = other DNA
ctaaaacaacttttgcatctattctgcaaaagattttgtaatcggttttt

SEQ ID NO: 57936 - DNA, 50 bp, synthetic construct
  source 1..50: mol_type = other DNA
ataaccctttaaactagaatattaattaatgggataatttcaaagtttac

SEQ ID NO: 57937 - DNA, 50 bp, synthetic construct
  source 1..50: mol_type = other DNA
aggatcatcgtatttcttttctataattaggcaagaaaaaagacgataga

SEQ ID NO: 57938 - DNA, 50 bp, synthetic construct
  source 1..50: mol_type = other DNA
actctaaaagcagtgtttatcaagcttctaagaaataatgtttatgtaac

SEQ ID NO: 57939 - DNA, 50 bp, synthetic construct
  source 1..50: mol_type = other DNA
atacttttctcattgttacaccatacatttaatgcctatttcaaaagttg

SEQ ID NO: 57940 - DNA, 50 bp, synthetic construct
  source 1..50: mol_type = other DNA
caagtcaacgtcgccgtcgttcccgggtgacgcccggtgccgcgagcttc

SEQ ID NO: 57941 - DNA, 50 bp, synthetic construct
  source 1..50: mol_type = other DNA
ggcggatcatggtcatggcccgccctgccgggactgcgagaagatcagcc

SEQ ID NO: 57942 - DNA, 50 bp, synthetic construct
  source 1..50: mol_type = other DNA
gtgcgtattaaaaataactaagggatactttactttcctcacttacgata

SEQ ID NO: 57943 - DNA, 50 bp, synthetic construct
  source 1..50: mol_type = other DNA
tctctaatataattttaaatgaaataataaatataaaattgtatatgagg

SEQ ID NO: 57944 - DNA, 50 bp, synthetic construct
  source 1..50: mol_type = other DNA
gtgtgtgaaatgttacctaataccacggtgatagtcaatgtttcacacaa

SEQ ID NO: 57945 - DNA, 50 bp, synthetic construct
  source 1..50: mol_type = other DNA
tataacatttagttgtcttttgcaaatgcaacaacggacatttgcttaat

SEQ ID NO: 57946 - DNA, 50 bp, synthetic construct
  source 1..50: mol_type = other DNA
ttcttttaactcttgtttcttttgttttaaatgcactagagacctattgc

SEQ ID NO: 57947 - DNA, 50 bp, synthetic construct
  source 1..50: mol_type = other DNA
ggaaaggagtaaccccatggccaccggtatccatttattgcctccattgg

SEQ ID NO: 57948 - DNA, 50 bp, synthetic construct
  source 1..50: mol_type = other DNA
acgacggcacaaccctctagacaggccaaggatgcggctagcgccgtccc

SEQ ID NO: 57949 - DNA, 50 bp, synthetic construct
  source 1..50: mol_type = other DNA
tctgcctgtttgtatgggtcgtcatagcatttaattcccaaacagaatat

SEQ ID NO: 57950 - DNA, 50 bp, synthetic construct
  source 1..50: mol_type = other DNA
gcaccaacctatgtctatcttgcttcaattctatatccatagggtgtgtg

SEQ ID NO: 57951 - DNA, 50 bp, synthetic construct
  source 1..50: mol_type = other DNA
gctcaacgctgcttcccccttcttggctgatagggatagcgccgttgaag

SEQ ID NO: 57952 - DNA, 50 bp, synthetic construct
  source 1..50: mol_type = other DNA
gcggatgcgcggatgcggcgccagcgttcggagtcgacgagcgccttcgg

SEQ ID NO: 57953 - DNA, 50 bp, synthetic construct
  source 1..50: mol_type = other DNA
agaatgctaggaacttgtcgaaaaagggttcgcggtgtcaggcacgatcc

SEQ ID NO: 57954 - DNA, 50 bp, synthetic construct
  source 1..50: mol_type = other DNA
tcataaccttgtccttgtagcatttgacgctgagattgacagaattatgg

SEQ ID NO: 57955 - DNA, 50 bp, synthetic construct
  source 1..50: mol_type = other DNA
cgtagatcgcgactttcaaaacctggccgtcctgaaagattacgcaatcg

SEQ ID NO: 57956 - DNA, 50 bp, synthetic construct
  source 1..50: mol_type = other DNA
ggcggggcgtccggcgtgcttgcgggcgtttacacgcctcctctccggcg

SEQ ID NO: 57957 - DNA, 50 bp, synthetic construct
  source 1..50: mol_type = other DNA
ggcggacctgtccgggggcgtcaccgctgactgaccgggaactgtccctc

SEQ ID NO: 57958 - DNA, 50 bp, synthetic construct
  source 1..50: mol_type = other DNA
tagttctttttcatactaatacatttatttttttatttcaaaaagtattg

SEQ ID NO: 57959 - DNA, 50 bp, synthetic construct
  source 1..50: mol_type = other DNA
gcacattctccttttccttttgtcatgttacaattgcaagtagacaaaca

SEQ ID NO: 57960 - DNA, 50 bp, synthetic construct
  source 1..50: mol_type = other DNA
gtgccgacgatccgctcctgcgtcgcctcgcggtcggggccggtgcccag

SEQ ID NO: 57961 - DNA, 50 bp, synthetic construct
  source 1..50: mol_type = other DNA
ccctgtaaggggcagacaggaagagcgcttaaaagctgcccagaacaaac

SEQ ID NO: 57962 - DNA, 50 bp, synthetic construct
  source 1..50: mol_type = other DNA
ttcttgagagaaaaaacaaatcaaatttgctatatattttagctattttg

SEQ ID NO: 57963 - DNA, 50 bp, synthetic construct
  source 1..50: mol_type = other DNA
gtcctgaagggcatcgagcacggcgcccagccgtcattgcggacagcgac

SEQ ID NO: 57964 - DNA, 50 bp, synthetic construct
  source 1..50: mol_type = other DNA
gggcgtctctgggttagcagcggggccccgccgctgtccgtaccgcgaca

SEQ ID NO: 57965 - DNA, 50 bp, synthetic construct
  source 1..50: mol_type = other DNA
tgcgaacgcaagtcgcgctccgactgcggcgcgctcgaccagcgctcgcc

SEQ ID NO: 57966 - DNA, 50 bp, synthetic construct
  source 1..50: mol_type = other DNA
gccgcgcgcgtcgcactatgctgcggcgctcaaagatgagatcgcgcggc

SEQ ID NO: 57967 - DNA, 50 bp, synthetic construct
  source 1..50: mol_type = other DNA
gagctaccccgccatcggacttcgacctcaccacgatgattgagaagatc

SEQ ID NO: 57968 - DNA, 50 bp, synthetic construct
  source 1..50: mol_type = other DNA
tcgcgagcagcagccgcctaccttgatcgtcagcacgcaggtacacgctc

SEQ ID NO: 57969 - DNA, 50 bp, synthetic construct
  source 1..50: mol_type = other DNA
gatgcagctcgccctcggcgatgcgcaaagagccgaccaattgctggccg

SEQ ID NO: 57970 - DNA, 50 bp, synthetic construct
  source 1..50: mol_type = other DNA
ccgcggaaggtcgacgggtcgatcgccgcggcaccgtcgcgacggcgcgg

SEQ ID NO: 57971 - DNA, 50 bp, synthetic construct
  source 1..50: mol_type = other DNA
aattaatttatcaagttttttgatccacctaaatatttgataatataagc

SEQ ID NO: 57972 - DNA, 50 bp, synthetic construct
  source 1..50: mol_type = other DNA
gctggccttggccgccgtctttgtcatcaaagcgggcgggcaagtccttg

SEQ ID NO: 57973 - DNA, 50 bp, synthetic construct
  source 1..50: mol_type = other DNA
gcagcagcgatggccagtgctttgaagtccaggctgcccggagctgctgc

SEQ ID NO: 57974 - DNA, 50 bp, synthetic construct
  source 1..50: mol_type = other DNA
agaatctaaaagtagaggattaaaaacgagaagaggtgcttttttattgg

SEQ ID NO: 57975 - DNA, 50 bp, synthetic construct
  source 1..50: mol_type = other DNA
tctccgctagaaatggggagaaagttatttcttaacatttttcctgcagt

SEQ ID NO: 57976 - DNA, 50 bp, synthetic construct
  source 1..50: mol_type = other DNA
acatgacacttaatgaggtaagaactttcttacttgctctgctgtcattt

SEQ ID NO: 57977 - DNA, 50 bp, synthetic construct
  source 1..50: mol_type = other DNA
gaagcggaagttatctgtggtctgctgagttcacagataaaacactctcc

SEQ ID NO: 57978 - DNA, 50 bp, synthetic construct
  source 1..50: mol_type = other DNA
ttggccgcggccgcgttcgccggggtgtcggcgaagcacggggtggcgct

SEQ ID NO: 57979 - DNA, 50 bp, synthetic construct
  source 1..50: mol_type = other DNA
agcggatcttgaccttgccgtcctcgagaacaaaaagggtgagcaccgct

SEQ ID NO: 57980 - DNA, 50 bp, synthetic construct
  source 1..50: mol_type = other DNA
ggcaagttcgttgctgccgaggccgttggatcggcagccactatctcgag

SEQ ID NO: 57981 - DNA, 50 bp, synthetic construct
  source 1..50: mol_type = other DNA
gtatctccgggccgctctggagcaccagctctcttactacacggagaaaa

SEQ ID NO: 57982 - DNA, 50 bp, synthetic construct
  source 1..50: mol_type = other DNA
ctgaagctgtaattgaaactgaagtttacaaggaagtgttagagagactc

SEQ ID NO: 57983 - DNA, 50 bp, synthetic construct
  source 1..50: mol_type = other DNA
agctggtagctcggtggctccgtggccgaggaaggcctgacctaccacct

SEQ ID NO: 57984 - DNA, 50 bp, synthetic construct
  source 1..50: mol_type = other DNA
ctctaatgaaatgattacggaaaccagttgtagtaaaagggaaattagtt

SEQ ID NO: 57985 - DNA, 50 bp, synthetic construct
  source 1..50: mol_type = other DNA
aaagaattaaaatatatcatttcttaagaatgttaatatttctttaattt

SEQ ID NO: 57986 - DNA, 50 bp, synthetic construct
  source 1..50: mol_type = other DNA
agaaaagcctaaaaggcttttatggatataaacctcattttttattatcg

SEQ ID NO: 57987 - DNA, 50 bp, synthetic construct
  source 1..50: mol_type = other DNA
attatcacttacggccccatatttagcaaggcaatcaagaaagcaaatgt

SEQ ID NO: 57988 - DNA, 50 bp, synthetic construct
  source 1..50: mol_type = other DNA
gcatccttatctcgtttacaaaaggaaataaaaaaataaccattttattg

SEQ ID NO: 57989 - DNA, 50 bp, synthetic construct
  source 1..50: mol_type = other DNA
gccaccgccgacgagggtacccgagcttctcgtctggcggtggcggtggg

SEQ ID NO: 57990 - DNA, 50 bp, synthetic construct
  source 1..50: mol_type = other DNA
tctaaccgggaaaatgtggagtatatacattccatatgactacaccgccc

SEQ ID NO: 57991 - DNA, 50 bp, synthetic construct
  source 1..50: mol_type = other DNA
ccgacggccagatcgccgccatcacggtcatgccgcgctcctgtcgccgg

SEQ ID NO: 57992 - DNA, 50 bp, synthetic construct
  source 1..50: mol_type = other DNA
ggcaaattatcaggacaagtgaaattattgacccgttcgattaatttgcg

SEQ ID NO: 57993 - DNA, 50 bp, synthetic construct
  source 1..50: mol_type = other DNA
gtgccccaaggccttgactgatagcgcgcccaagggggtgctctgggtaa

SEQ ID NO: 57994 - DNA, 50 bp, synthetic construct
  source 1..50: mol_type = other DNA
aaagctgtcgcgcatctcgtggatgcgcagaggagatgatcctccccttc

SEQ ID NO: 57995 - DNA, 50 bp, synthetic construct
  source 1..50: mol_type = other DNA
agtagcctgaccgtttaccgacattttttgatcatcactgtcccgctaca

SEQ ID NO: 57996 - DNA, 50 bp, synthetic construct
  source 1..50: mol_type = other DNA
attccatattttcttcaaaaacaagattgattttgatacggctatgaatc

SEQ ID NO: 57997 - DNA, 50 bp, synthetic construct
  source 1..50: mol_type = other DNA
ctataggatagagaatggaatagcaggaggagggtttacccctttttgtt

SEQ ID NO: 57998 - DNA, 50 bp, synthetic construct
  source 1..50: mol_type = other DNA
attagtgtttagtattgactaaatacctttagtaaggatagaacacttaa

SEQ ID NO: 57999 - DNA, 50 bp, synthetic construct
  source 1..50: mol_type = other DNA
tggatatcacccaagactgccttgatcccacacttcaagaggatcccttt

SEQ ID NO: 58000 - DNA, 50 bp, synthetic construct
  source 1..50: mol_type = other DNA
caaccttctggtttttgtttgtataaataagaaaaaaaagccccgttatg

SEQ ID NO: 58001 - DNA, 50 bp, synthetic construct
  source 1..50: mol_type = other DNA
cctggcctggttcgcttcgccctggccaaagcgatgatcagacgcgcagc

SEQ ID NO: 58002 - DNA, 50 bp, synthetic construct
  source 1..50: mol_type = other DNA
tctgttcgtttgtcagcaggattggaaaatctattacacaaaagagaaga

SEQ ID NO: 58003 - DNA, 50 bp, synthetic construct
  source 1..50: mol_type = other DNA
tgaaatgccgctgttaagaggaggtcacttctattaactggtgctcattc

SEQ ID NO: 58004 - DNA, 50 bp, synthetic construct
  source 1..50: mol_type = other DNA
caacacagtttttggataggagtggagactcctatccttaaagtgtgttt

SEQ ID NO: 58005 - DNA, 50 bp, synthetic construct
  source 1..50: mol_type = other DNA
tcccacactttcttacttggattgtacaatagacgagagaatatgtgatg

SEQ ID NO: 58006 - DNA, 50 bp, synthetic construct
  source 1..50: mol_type = other DNA
aggcacccacaccctctcgtcatggacaatgagagagggccgagaggcga

SEQ ID NO: 58007 - DNA, 50 bp, synthetic construct
  source 1..50: mol_type = other DNA
ttaaaagaattatatcaaatacggtatcatccgtgatataccactcaacg

SEQ ID NO: 58008 - DNA, 50 bp, synthetic construct
  source 1..50: mol_type = other DNA
aggcacgggcggcatcggcaaggtcgaccttggcgatgcgggtatagcat

SEQ ID NO: 58009 - DNA, 50 bp, synthetic construct
  source 1..50: mol_type = other DNA
aataagaatatctctatatctatagaccataataaccgccaacgtttgtg

SEQ ID NO: 58010 - DNA, 50 bp, synthetic construct
  source 1..50: mol_type = other DNA
ataactgtcccacagcagcaccagcaaccagtgtactgacctgcagtttg

SEQ ID NO: 58011 - DNA, 50 bp, synthetic construct
  source 1..50: mol_type = other DNA
accatcaaaaatggttgctgaattgctgctgtgcaagctggattgattca

SEQ ID NO: 58012 - DNA, 50 bp, synthetic construct
  source 1..50: mol_type = other DNA
gattttttcttttttactatgagagataacataatattcaagaaaaataa

SEQ ID NO: 58013 - DNA, 50 bp, synthetic construct
  source 1..50: mol_type = other DNA
tcacgtaaaagcaaagaataacacttttattattcattacttatacttct

SEQ ID NO: 58014 - DNA, 50 bp, synthetic construct
  source 1..50: mol_type = other DNA
gaatgtacaatagagttgccgatgaaaacccacaactctactgtagagtc

SEQ ID NO: 58015 - DNA, 50 bp, synthetic construct
  source 1..50: mol_type = other DNA
caatatatcccttacttttgcagaattttgtatccatatggaatatatgc

SEQ ID NO: 58016 - DNA, 50 bp, synthetic construct
  source 1..50: mol_type = other DNA
caatataaaaaataaggtgacaaatactgctcacaattttactgataaat

SEQ ID NO: 58017 - DNA, 50 bp, synthetic construct
  source 1..50: mol_type = other DNA
acaacaaaatcttgcgtgtattttccaaaataatctgaaactttttgttt

SEQ ID NO: 58018 - DNA, 50 bp, synthetic construct
  source 1..50: mol_type = other DNA
atgggcgtcgcttcggggcgcagcgccctgcgagtcatgtccagcccggg

SEQ ID NO: 58019 - DNA, 50 bp, synthetic construct
  source 1..50: mol_type = other DNA
cacaaacaaacaaaggaggaaacttatgtttcatcctttctttgtttatg

SEQ ID NO: 58020 - DNA, 50 bp, synthetic construct
  source 1..50: mol_type = other DNA
aaaggttggtgaaatgatgagccatattcatcatctgttcaaaagggacg

SEQ ID NO: 58021 - DNA, 50 bp, synthetic construct
  source 1..50: mol_type = other DNA
tacttatactattataaataactacaacgcatttcatttatatttaaggc

SEQ ID NO: 58022 - DNA, 50 bp, synthetic construct
  source 1..50: mol_type = other DNA
gtatttgtcgttaaaaatgtcgtttatgggacattttagaggatagtttt

SEQ ID NO: 58023 - DNA, 50 bp, synthetic construct
  source 1..50: mol_type = other DNA
ataataattattatattaaagtttatattttttaaatatatattttataa

SEQ ID NO: 58024 - DNA, 50 bp, synthetic construct
  source 1..50: mol_type = other DNA
catgaaggacaaatatgtatcaatccaacttcaaatagatgccaatcatg

SEQ ID NO: 58025 - DNA, 50 bp, synthetic construct
  source 1..50: mol_type = other DNA
tgttggtattgttaagcattttgagcttatgataagtagcaatgagaaaa

SEQ ID NO: 58026 - DNA, 50 bp, synthetic construct
  source 1..50: mol_type = other DNA
acgaaattcacacgaatctattactaaagccccttttgtgggcttttctt

SEQ ID NO: 58027 - DNA, 50 bp, synthetic construct
  source 1..50: mol_type = other DNA
tcctctaaacgccgataattatcttgaattcaggaacggcctttagccga

SEQ ID NO: 58028 - DNA, 50 bp, synthetic construct
  source 1..50: mol_type = other DNA
ctgaacttttgcgctgagttcttctgtgcaggaagctcgcagcagctcag

SEQ ID NO: 58029 - DNA, 50 bp, synthetic construct
  source 1..50: mol_type = other DNA
gatgttggcctctttgctcaactgggcaggatgccaaagtggctcactgg

SEQ ID NO: 58030 - DNA, 50 bp, synthetic construct
  source 1..50: mol_type = other DNA
atgggtaataaaaataatattgtttcattaatattatttaagaaaccaaa

SEQ ID NO: 58031 - DNA, 50 bp, synthetic construct
  source 1..50: mol_type = other DNA
tttaacataaaaaaggtattaaaaaagtataatatcctccttatttttag

SEQ ID NO: 58032 - DNA, 50 bp, synthetic construct
  source 1..50: mol_type = other DNA
ttttattatatatattaaattttgaataaaatggaggtaatatggtttta

SEQ ID NO: 58033 - DNA, 50 bp, synthetic construct
  source 1..50: mol_type = other DNA
ttgaaaaggagagtataagctatgcattttatatctacaaaagttttcag

SEQ ID NO: 58034 - DNA, 50 bp, synthetic construct
  source 1..50: mol_type = other DNA
attatgccattaaagcatataaaaattctcttactttttctgctgctata

SEQ ID NO: 58035 - DNA, 50 bp, synthetic construct
  source 1..50: mol_type = other DNA
ttgaagaatggttgaaaattacattcaacaaatccgtaaccatctttatt

SEQ ID NO: 58036 - DNA, 50 bp, synthetic construct
  source 1..50: mol_type = other DNA
agaagtgcttgaaattctccttgaaagagaggataagatacagatgaaaa

SEQ ID NO: 58037 - DNA, 50 bp, synthetic construct
  source 1..50: mol_type = other DNA
ctgcattatcctaaaatataaatatatattatattgttagtatacaatat

SEQ ID NO: 58038 - DNA, 50 bp, synthetic construct
  source 1..50: mol_type = other DNA
cagtgtcatcatatacgtgataattcttcatcgcgtatatgatgacactg

SEQ ID NO: 58039 - DNA, 50 bp, synthetic construct
  source 1..50: mol_type = other DNA
aggtaaaaagatgaactgatttttagcaatcgcaggacatttttttacca

SEQ ID NO: 58040 - DNA, 50 bp, synthetic construct
  source 1..50: mol_type = other DNA
ttttccaatataacaagctgctataaaaatggccttgttttcgaggaaac

SEQ ID NO: 58041 - DNA, 50 bp, synthetic construct
  source 1..50: mol_type = other DNA
gcaacagtaacagtaattccggcaaactccggaagacatgttttatcgag

SEQ ID NO: 58042 - DNA, 50 bp, synthetic construct
  source 1..50: mol_type = other DNA
gaataagtggcacattttacataatgcaattaaaaaatggccttgctttc

SEQ ID NO: 58043 - DNA, 50 bp, synthetic construct
  source 1..50: mol_type = other DNA
aataacggggggcggaagccccctttctttgggcggttagctcagtggtt

SEQ ID NO: 58044 - DNA, 50 bp, synthetic construct
  source 1..50: mol_type = other DNA
taacacataatgtaagttatcactatagtggtagatgttgttatttggaa

SEQ ID NO: 58045 - DNA, 50 bp, synthetic construct
  source 1..50: mol_type = other DNA
gtcgctgcgcggcgttctggctagaaatatacagtcactggaccgccggg

SEQ ID NO: 58046 - DNA, 50 bp, synthetic construct
  source 1..50: mol_type = other DNA
tgatcaaatatttaatgattccataaatgctgtcattatatatacttatg

SEQ ID NO: 58047 - DNA, 50 bp, synthetic construct
  source 1..50: mol_type = other DNA
cttgaatattcaagaattacctgttatcgggtatcttacaccttttcaat

SEQ ID NO: 58048 - DNA, 50 bp, synthetic construct
  source 1..50: mol_type = other DNA
gaaggtatacctctccttttgtttttaatatatactacagttatattaat

SEQ ID NO: 58049 - DNA, 50 bp, synthetic construct
  source 1..50: mol_type = other DNA
gttaactcgtttccttctttatcggtagctgcgcgagatgccgagctgct

SEQ ID NO: 58050 - DNA, 50 bp, synthetic construct
  source 1..50: mol_type = other DNA
gttgtgtcttgacagcaagtgctctcggggacattctggcgagacacaac

SEQ ID NO: 58051 - DNA, 50 bp, synthetic construct
  source 1..50: mol_type = other DNA
tcgccgtcgaccgtcacggtcatcgcgcgggtcgagcggctctctggcgt

SEQ ID NO: 58052 - DNA, 50 bp, synthetic construct
  source 1..50: mol_type = other DNA
gtcgccgtcctcgcggcggcgaatccgccgcgcgcaacgtagacctcgtg

SEQ ID NO: 58053 - DNA, 50 bp, synthetic construct
  source 1..50: mol_type = other DNA
tctcttaaatacatatatccttttatctaaggatatatgtatttacccta

SEQ ID NO: 58054 - DNA, 50 bp, synthetic construct
  source 1..50: mol_type = other DNA
attgcacagtatagctgcatctactgatagctgccccctcactgtgcaat

SEQ ID NO: 58055 - DNA, 50 bp, synthetic construct
  source 1..50: mol_type = other DNA
gagcaggctgaacgtcaaccgctggattcatctggacgtcgaggccgctg

SEQ ID NO: 58056 - DNA, 50 bp, synthetic construct
  source 1..50: mol_type = other DNA
cttccaaaaggaatcggtcgctcgagcgagcgcgttgctttgtagcgaat

SEQ ID NO: 58057 - DNA, 50 bp, synthetic construct
  source 1..50: mol_type = other DNA
atgtcgttgggtggccaccagccttatgcctttaacaacgccaaccccag

SEQ ID NO: 58058 - DNA, 50 bp, synthetic construct
  source 1..50: mol_type = other DNA
cctagggttttggtttatttaccgttaactcgataagggtaaatcctcgt

SEQ ID NO: 58059 - DNA, 50 bp, synthetic construct
  source 1..50: mol_type = other DNA
gttcaacgattacctcctggcgcgatagcgaaaggaggtcattatggaaa

SEQ ID NO: 58060 - DNA, 50 bp, synthetic construct
  source 1..50: mol_type = other DNA
tttctcagcaaaaataatttgcggcgcgggaaaggacgcttgcatatcaa

SEQ ID NO: 58061 - DNA, 50 bp, synthetic construct
  source 1..50: mol_type = other DNA
cattagaattataaaaaccattttttaacttggttttcataacttgatag

SEQ ID NO: 58062 - DNA, 50 bp, synthetic construct
  source 1..50: mol_type = other DNA
ttaaggtttttagtcaaagctgttttaatatcttttactaaaaactttat

SEQ ID NO: 58063 - DNA, 50 bp, synthetic construct
  source 1..50: mol_type = other DNA
tcttaggtgtgatgtcggcggtggggacatggccgcgatcccgccggagc

SEQ ID NO: 58064 - DNA, 50 bp, synthetic construct
  source 1..50: mol_type = other DNA
tgtgttaacctatttttctttcttaaaagaaagccataaggcttttcttt

SEQ ID NO: 58065 - DNA, 50 bp, synthetic construct
  source 1..50: mol_type = other DNA
tcaatagcgccagcgggttgtcctccaggcctggtcccgggaagggctga

SEQ ID NO: 58066 - DNA, 50 bp, synthetic construct
  source 1..50: mol_type = other DNA
tactgttgagtaacaaaacagttagcaaacaaagtaattacccattaagt

SEQ ID NO: 58067 - DNA, 50 bp, synthetic construct
  source 1..50: mol_type = other DNA
acgtaggagtaagctagacgctttggcaagacccctgctttcgtcgaagc

SEQ ID NO: 58068 - DNA, 50 bp, synthetic construct
  source 1..50: mol_type = other DNA
aaggaaagtataaaaaataaaaaatattttcgattcagtattgtaagtaa

SEQ ID NO: 58069 - DNA, 50 bp, synthetic construct
  source 1..50: mol_type = other DNA
attacacctgttaaaaagtagtaaattatttaattattagttaatgtatc

SEQ ID NO: 58070 - DNA, 50 bp, synthetic construct
  source 1..50: mol_type = other DNA
tcgccgccgagatggaagcccaaggccgcggcggtcatcggcggcggcac

SEQ ID NO: 58071 - DNA, 50 bp, synthetic construct
  source 1..50: mol_type = other DNA
aattgacaatataaaatcgaaagtatacatcaaattgtatatattaaatt

SEQ ID NO: 58072 - DNA, 50 bp, synthetic construct
  source 1..50: mol_type = other DNA
ttccatagaaataaataataataactatattatagatactttttatagat

SEQ ID NO: 58073 - DNA, 50 bp, synthetic construct
  source 1..50: mol_type = other DNA
aatatgtattctatagtacgctggaagcagcgtaaagcaaaatacatcat

SEQ ID NO: 58074 - DNA, 50 bp, synthetic construct
  source 1..50: mol_type = other DNA
ggggcacggtggcgtcgggtggcgcgcgcccgctgaccatctcgtgccac

SEQ ID NO: 58075 - DNA, 50 bp, synthetic construct
  source 1..50: mol_type = other DNA
caatggtattgggattccaaaagaaagctaaagcgatctatagaaatgga

SEQ ID NO: 58076 - DNA, 50 bp, synthetic construct
  source 1..50: mol_type = other DNA
taccgtcctttctgaatgatgacgtgttgtcactgctgtggcatacggta

SEQ ID NO: 58077 - DNA, 50 bp, synthetic construct
  source 1..50: mol_type = other DNA
ctatctcatctgaacaagctatcgctgtttggctggttctatcgtgataa

SEQ ID NO: 58078 - DNA, 50 bp, synthetic construct
  source 1..50: mol_type = other DNA
tcaaactgatggtaagataaatcatatgaagccaacaatcattacttatc

SEQ ID NO: 58079 - DNA, 50 bp, synthetic construct
  source 1..50: mol_type = other DNA
ttgaaaaccttgtcttgtaagtcggtgcagttattaaccaaccggttcta

SEQ ID NO: 58080 - DNA, 50 bp, synthetic construct
  source 1..50: mol_type = other DNA
aatacatttatctgaagctatttctagcaattcctccattattgattaag

SEQ ID NO: 58081 - DNA, 50 bp, synthetic construct
  source 1..50: mol_type = other DNA
tcccgccgcaggtgccgcgggcgacgggctagctggtacctagcccggtc

SEQ ID NO: 58082 - DNA, 50 bp, synthetic construct
  source 1..50: mol_type = other DNA
aagcggtaaaaatggaaagtaccattacttgagttatatttttcatcata

SEQ ID NO: 58083 - DNA, 50 bp, synthetic construct
  source 1..50: mol_type = other DNA
tgtaaactttcgttttattcatgctatgagcaaagaaatgaaactaggtt

SEQ ID NO: 58084 - DNA, 50 bp, synthetic construct
  source 1..50: mol_type = other DNA
ctaagatatttagatacgctactcgagacaagagtatctaaatatcctgt

SEQ ID NO: 58085 - DNA, 50 bp, synthetic construct
  source 1..50: mol_type = other DNA
cataaatacctccgtattacaatattaaattagataagtcattatttaaa

SEQ ID NO: 58086 - DNA, 50 bp, synthetic construct
  source 1..50: mol_type = other DNA
tttataaatttattttaattaagatactaaaatgttactaaaataataaa

SEQ ID NO: 58087 - DNA, 50 bp, synthetic construct
  source 1..50: mol_type = other DNA
aaaagggtcaaaaaacggtattttttaaaataaaggatttttaccctttg

SEQ ID NO: 58088 - DNA, 50 bp, synthetic construct
  source 1..50: mol_type = other DNA
aaattaatatttccttctaacataggtaatttattatcaaatattaatgg

SEQ ID NO: 58089 - DNA, 50 bp, synthetic construct
  source 1..50: mol_type = other DNA
ctataaaaaatatctataacataaatttatattaatgagtttttttaatt

SEQ ID NO: 58090 - DNA, 50 bp, synthetic construct
  source 1..50: mol_type = other DNA
tgtaccccggcacggacgtcgaacgcgttccgcgcacacgagggcttcct

SEQ ID NO: 58091 - DNA, 50 bp, synthetic construct
  source 1..50: mol_type = other DNA
gataatatcatgattggcatctatttttagattccaatccccagaaacga

SEQ ID NO: 58092 - DNA, 50 bp, synthetic construct
  source 1..50: mol_type = other DNA
catcgtcctggtccagctccgtcagcaaaaacaggaggtgagcaggcatg

SEQ ID NO: 58093 - DNA, 50 bp, synthetic construct
  source 1..50: mol_type = other DNA
ggaaattttgcaaggtttgagcaaaaacggtgaaaaagtggaaaagctgt

SEQ ID NO: 58094 - DNA, 50 bp, synthetic construct
  source 1..50: mol_type = other DNA
atgacatgtccggcctgggccggtgcataggtccacccccgacataacat

SEQ ID NO: 58095 - DNA, 50 bp, synthetic construct
  source 1..50: mol_type = other DNA
aatctgtgtctgcccgccttgtctgcagatggtgcggttttttcatgtca

SEQ ID NO: 58096 - DNA, 50 bp, synthetic construct
  source 1..50: mol_type = other DNA
aaggtccgccactccttcttctgcgcacagaagaaggagtggaaaagatg

SEQ ID NO: 58097 - DNA, 50 bp, synthetic construct
  source 1..50: mol_type = other DNA
aattgaaattgtatttaaatagtccaaagattttattgaaaaaaagcggc

SEQ ID NO: 58098 - DNA, 50 bp, synthetic construct
  source 1..50: mol_type = other DNA
ttttgaaatctaagttgagcatgtatagatactttttatagatgcagggc

SEQ ID NO: 58099 - DNA, 50 bp, synthetic construct
  source 1..50: mol_type = other DNA
tataaaaatatacccaaggttaataaattagaagttaatatatttttatt

SEQ ID NO: 58100 - DNA, 50 bp, synthetic construct
  source 1..50: mol_type = other DNA
ttaataaaaaataagtaaattataactgtaacatagttgttttttattaa

SEQ ID NO: 58101 - DNA, 50 bp, synthetic construct
  source 1..50: mol_type = other DNA
ttaataaaaaacaactatgttacagttataatttacttattttttattaa

SEQ ID NO: 58102 - DNA, 50 bp, synthetic construct
  source 1..50: mol_type = other DNA
gccgggtacgtcccgtccgcgatgcggtgcggcaggtggacctaccgcga

SEQ ID NO: 58103 - DNA, 50 bp, synthetic construct
  source 1..50: mol_type = other DNA
agtaaggagacttatagagaaaataattcagaagtatacaaatcctttta

SEQ ID NO: 58104 - DNA, 50 bp, synthetic construct
  source 1..50: mol_type = other DNA
gtttaaatttatagttaaattatgtatcttttacttttataaattttttc

SEQ ID NO: 58105 - DNA, 50 bp, synthetic construct
  source 1..50: mol_type = other DNA
ggctgatcaggttgctaatcggctactaaaaagcagcaacctgatgaggg

SEQ ID NO: 58106 - DNA, 50 bp, synthetic construct
  source 1..50: mol_type = other DNA
agagaacaccgttaaatttagcacctcggtaataattaacttggttttca

SEQ ID NO: 58107 - DNA, 50 bp, synthetic construct
  source 1..50: mol_type = other DNA
ccgtagagcattacccgacttaagcacttaatcgcggtttacatcagcgc

SEQ ID NO: 58108 - DNA, 50 bp, synthetic construct
  source 1..50: mol_type = other DNA
aaaaaagagccctttagaggctcttaaaacaataataatcacttgaattt

SEQ ID NO: 58109 - DNA, 50 bp, synthetic construct
  source 1..50: mol_type = other DNA
tccttcgtcgggcggcggtctcttcgagtttggcgcgccatttcgtcagg

SEQ ID NO: 58110 - DNA, 50 bp, synthetic construct
  source 1..50: mol_type = other DNA
atcactcaatacacaaaacccttataatcgggtgatttttattagacacg

SEQ ID NO: 58111 - DNA, 50 bp, synthetic construct
  source 1..50: mol_type = other DNA
ccacctcaaaactgatacctagattgtaaaaacaggacaatatcaggtga

SEQ ID NO: 58112 - DNA, 50 bp, synthetic construct
  source 1..50: mol_type = other DNA
aatattcaaacttcctattattgaaaatgataaaaaagagagcgtatatc

SEQ ID NO: 58113 - DNA, 50 bp, synthetic construct
  source 1..50: mol_type = other DNA
accacgaacccggcaccggcgctgacgtgctccgggcccggggccgcacc

SEQ ID NO: 58114 - DNA, 50 bp, synthetic construct
  source 1..50: mol_type = other DNA
acccaaagagaaattgaaatcgtatttttgaagtgccattctctttggga

SEQ ID NO: 58115 - DNA, 50 bp, synthetic construct
  source 1..50: mol_type = other DNA
cattatacatataagaaaactacaaccttagtattgctattattatacca

SEQ ID NO: 58116 - DNA, 50 bp, synthetic construct
  source 1..50: mol_type = other DNA
acgggtccagaaataaaagcccttttgataagagttatttgtctacctta

SEQ ID NO: 58117 - DNA, 50 bp, synthetic construct
  source 1..50: mol_type = other DNA
ctgcttttattatgatgaaaaatcaatttttttcattttaaggtaaaaaa

SEQ ID NO: 58118 - DNA, 50 bp, synthetic construct
  source 1..50: mol_type = other DNA
caagttcctcaattttattatcaatgttctttatcaatttcttgaacaag

SEQ ID NO: 58119 - DNA, 50 bp, synthetic construct
  source 1..50: mol_type = other DNA
atggaacttataattttatttagcttaaaaaataccgtaattaaacttcc

SEQ ID NO: 58120 - DNA, 50 bp, synthetic construct
  source 1..50: mol_type = other DNA
gtagtaggtagttgtctatggaaggtggtccatgcgaaactacctactac

SEQ ID NO: 58121 - DNA, 50 bp, synthetic construct
  source 1..50: mol_type = other DNA
agctgcgccggttgtcgatagccgttgcgctatcaatttccctacgcacc

SEQ ID NO: 58122 - DNA, 50 bp, synthetic construct
  source 1..50: mol_type = other DNA
taagggccacaatttcttccatattcatatgatcctaattcccttagttt

SEQ ID NO: 58123 - DNA, 50 bp, synthetic construct
  source 1..50: mol_type = other DNA
cccgcagccaacataaagatggaactagttattatttcgttgagataacc

SEQ ID NO: 58124 - DNA, 50 bp, synthetic construct
  source 1..50: mol_type = other DNA
ttaaaaagactaaatgttcactaaatcaacacttcattacattagttcct

SEQ ID NO: 58125 - DNA, 50 bp, synthetic construct
  source 1..50: mol_type = other DNA
agacagaagttcagactctcgcgtgcccgccgcatcttgaactttactga

SEQ ID NO: 58126 - DNA, 50 bp, synthetic construct
  source 1..50: mol_type = other DNA
atgagcagaaaaaataatcgtcgtttttgacgcaggagaatttcgtttgc

SEQ ID NO: 58127 - DNA, 50 bp, synthetic construct
  source 1..50: mol_type = other DNA
acttcacattcttttagagaaatcatagtcctgttaaaagaaaggagcgt

SEQ ID NO: 58128 - DNA, 50 bp, synthetic construct
  source 1..50: mol_type = other DNA
aagacaaaagtaactgtagttgctctacattataaattgacttctgttcc

SEQ ID NO: 58129 - DNA, 50 bp, synthetic construct
  source 1..50: mol_type = other DNA
gtgtatcataagaaaggtgtattcctgaagagacctttctattgatacac

SEQ ID NO: 58130 - DNA, 50 bp, synthetic construct
  source 1..50: mol_type = other DNA
tttttactgactgccattcttgttcaaataaaccaaacagtaattaaaaa

SEQ ID NO: 58131 - DNA, 50 bp, synthetic construct
  source 1..50: mol_type = other DNA
gacaatcggtaaggacatagacgacgttttcaatacggtagccgaatggt

SEQ ID NO: 58132 - DNA, 50 bp, synthetic construct
  source 1..50: mol_type = other DNA
cagagcaagaaaatatcgcataacagggtatcaattattttctcgatcct

SEQ ID NO: 58133 - DNA, 50 bp, synthetic construct
  source 1..50: mol_type = other DNA
ggagtcagcggagctggaagaccagctggtcctcaaggaccggctcgcga

SEQ ID NO: 58134 - DNA, 50 bp, synthetic construct
  source 1..50: mol_type = other DNA
acatttttccgcaaagaagaaagcaatatttcttctccgcagaaaaaaag

SEQ ID NO: 58135 - DNA, 50 bp, synthetic construct
  source 1..50: mol_type = other DNA
tgccggcgacatcgcgcagggcgcgcggtacttcggcgatgtcttcgatg

SEQ ID NO: 58136 - DNA, 50 bp, synthetic construct
  source 1..50: mol_type = other DNA
gcatgccgtcgatgccgccttgcggagcgggccttgcatcgaagtgcggt

SEQ ID NO: 58137 - DNA, 50 bp, synthetic construct
  source 1..50: mol_type = other DNA
accgcttgtccgatcatcccattcccgaaatgcttgattttatccgcgct

SEQ ID NO: 58138 - DNA, 50 bp, synthetic construct
  source 1..50: mol_type = other DNA
cgcgccctcagagcaaatcggcgaaatcgtcgattgcagcgcgcctatcg

SEQ ID NO: 58139 - DNA, 50 bp, synthetic construct
  source 1..50: mol_type = other DNA
aattcttctttatataaaccatcaattaattgtttataataaaactaatt

SEQ ID NO: 58140 - DNA, 50 bp, synthetic construct
  source 1..50: mol_type = other DNA
tgacgttggcacctatcgctgaacatgttaggctatacgttccatcgcac

SEQ ID NO: 58141 - DNA, 50 bp, synthetic construct
  source 1..50: mol_type = other DNA
gtaattgatgccaacaagcataaatatataagttagtacacataaattat

SEQ ID NO: 58142 - DNA, 50 bp, synthetic construct
  source 1..50: mol_type = other DNA
gatcccgctcaccgaggacaccaggggtcaagtggtcgcaggttcaaatc

SEQ ID NO: 58143 - DNA, 50 bp, synthetic construct
  source 1..50: mol_type = other DNA
cgaccgtccaaactctaccggcccggtggccgggctcgtgtcgactctgc

SEQ ID NO: 58144 - DNA, 50 bp, synthetic construct
  source 1..50: mol_type = other DNA
cgtcgggccatcggatacctccgtgttcggccgcggttctgcgcccgccc

SEQ ID NO: 58145 - DNA, 50 bp, synthetic construct
  source 1..50: mol_type = other DNA
tttaatatatacaatttgatgtatatatatgattgcagcaatatattcaa

SEQ ID NO: 58146 - DNA, 50 bp, synthetic construct
  source 1..50: mol_type = other DNA
tctgtctccccagtacccgccgcagctgccacgggcaggtcttgaacacc

SEQ ID NO: 58147 - DNA, 50 bp, synthetic construct
  source 1..50: mol_type = other DNA
ttcacattcaatgtttttttatccttaaatcgaaatcagatgaatattgc

SEQ ID NO: 58148 - DNA, 50 bp, synthetic construct
  source 1..50: mol_type = other DNA
aataccaaagcaatacttcagaactacaatgaaaaaacctctttcttatt

SEQ ID NO: 58149 - DNA, 50 bp, synthetic construct
  source 1..50: mol_type = other DNA
gacatgaacttttttatcagcccactttaaatgagaatcaattgcatggg

SEQ ID NO: 58150 - DNA, 50 bp, synthetic construct
  source 1..50: mol_type = other DNA
atgcagcaagtcttaagtaaaagtgcatatatgtctaagacttttaaatc

SEQ ID NO: 58151 - DNA, 50 bp, synthetic construct
  source 1..50: mol_type = other DNA
cggtattgtttctctaagtaatattatgggtgtttagagcgaatatgtga

SEQ ID NO: 58152 - DNA, 50 bp, synthetic construct
  source 1..50: mol_type = other DNA
tttttgcagctgcattaaaatatgatgatccgttcctgcaggcagaatat

SEQ ID NO: 58153 - DNA, 50 bp, synthetic construct
  source 1..50: mol_type = other DNA
taaatcaattgttatagcttcttttaaaaattatctattaaacttctttt

SEQ ID NO: 58154 - DNA, 50 bp, synthetic construct
  source 1..50: mol_type = other DNA
cggcagggattcggcgttatgatgcgcggcgaaaccccgatcccgtgcgt

SEQ ID NO: 58155 - DNA, 50 bp, synthetic construct
  source 1..50: mol_type = other DNA
attcgcaatttctgcaaatatagacaatgcaatatggaggaatgtgatat

SEQ ID NO: 58156 - DNA, 50 bp, synthetic construct
  source 1..50: mol_type = other DNA
gatattatcgataatgttaataataatatggaaaatttattaattaattc

SEQ ID NO: 58157 - DNA, 50 bp, synthetic construct
  source 1..50: mol_type = other DNA
atgcgggagagcatatccccaaattgctttacggaagttttctgtgaatc

SEQ ID NO: 58158 - DNA, 50 bp, synthetic construct
  source 1..50: mol_type = other DNA
agtccgggtgccgcgccgcggctgggcggccgccgcgatggtgccgatgg

SEQ ID NO: 58159 - DNA, 50 bp, synthetic construct
  source 1..50: mol_type = other DNA
gatcgaggtgcgcggcgagggggctgcgcgcaaggcagcgcatgaggatt

SEQ ID NO: 58160 - DNA, 50 bp, synthetic construct
  source 1..50: mol_type = other DNA
ccttcttcagttgctttcgtgggttataacacagaaacatcaaaaaaaga

SEQ ID NO: 58161 - DNA, 50 bp, synthetic construct
  source 1..50: mol_type = other DNA
cataaatggctcatatttttcgagcatcaaaaaaagacgtgccaaattga

SEQ ID NO: 58162 - DNA, 50 bp, synthetic construct
  source 1..50: mol_type = other DNA
tttaataacctgatttatattgctactaaaatttaaatcaggtcacaaat

SEQ ID NO: 58163 - DNA, 50 bp, synthetic construct
  source 1..50: mol_type = other DNA
ctactttcataatatctcctttcgtaataaagcagtaattaaccaagcag

SEQ ID NO: 58164 - DNA, 50 bp, synthetic construct
  source 1..50: mol_type = other DNA
caggccgaaaaacagcggcccgttcccggcccgccagccgtttgcgcttc

SEQ ID NO: 58165 - DNA, 50 bp, synthetic construct
  source 1..50: mol_type = other DNA
atttgctacaggacatcccatatttacaagaccgatagtctgtagcaata

SEQ ID NO: 58166 - DNA, 50 bp, synthetic construct
  source 1..50: mol_type = other DNA
tattttgtggacatggtttttaggaggttatgaaataacatatcacaatt

SEQ ID NO: 58167 - DNA, 50 bp, synthetic construct
  source 1..50: mol_type = other DNA
aacccgcaacgaaaagaagggcatatatggcacctcttaacgctaaattt

SEQ ID NO: 58168 - DNA, 50 bp, synthetic construct
  source 1..50: mol_type = other DNA
gagcttgggggtcagcttgaggccccagccgtaagctgtgcccggcgcaa

SEQ ID NO: 58169 - DNA, 50 bp, synthetic construct
  source 1..50: mol_type = other DNA
gcggcgacgtcttcgacgatctggcgcccgttcgaagaccccggcgaggc

SEQ ID NO: 58170 - DNA, 50 bp, synthetic construct
  source 1..50: mol_type = other DNA
tgtaacggcggccttgagattatctcgaaatcctcgaggaccgccatggc

SEQ ID NO: 58171 - DNA, 50 bp, synthetic construct
  source 1..50: mol_type = other DNA
cctttcaccgatgcgcccgtcgtcgtcagcgaggtcgccgcggtgctggc

SEQ ID NO: 58172 - DNA, 50 bp, synthetic construct
  source 1..50: mol_type = other DNA
gtacttgtatcaattacaaaacgataggtgttattgaatgacggaaggac

SEQ ID NO: 58173 - DNA, 50 bp, synthetic construct
  source 1..50: mol_type = other DNA
atagctttgcaagaaatcaaactattttgtttgagttgttgcatgacatt

SEQ ID NO: 58174 - DNA, 50 bp, synthetic construct
  source 1..50: mol_type = other DNA
tcaataggggtaataaatctcattttataaatatatattatccatatgat

SEQ ID NO: 58175 - DNA, 50 bp, synthetic construct
  source 1..50: mol_type = other DNA
cgctaagtatttgtgctcaaaaatttctttttgagtgatatatagtagcg

SEQ ID NO: 58176 - DNA, 50 bp, synthetic construct
  source 1..50: mol_type = other DNA
atctgaatcattatcttcaggaacatattagtgaagaaagtaattactat

SEQ ID NO: 58177 - DNA, 50 bp, synthetic construct
  source 1..50: mol_type = other DNA
tggtggtcatcgggggctcactctcacggcgtagctgagcatgaccacag

SEQ ID NO: 58178 - DNA, 50 bp, synthetic construct
  source 1..50: mol_type = other DNA
atagtcgatatccagcatgacgctgtagagtcatgggctatttacttctg

SEQ ID NO: 58179 - DNA, 50 bp, synthetic construct
  source 1..50: mol_type = other DNA
ctattaatagcaagctttttagaacaatctaacattctcatgattgtcct

SEQ ID NO: 58180 - DNA, 50 bp, synthetic construct
  source 1..50: mol_type = other DNA
cgggtagcttagcgaacatgtcattggtgccatgtccactaaactaacca

SEQ ID NO: 58181 - DNA, 50 bp, synthetic construct
  source 1..50: mol_type = other DNA
ataattacaaatgctgcatataaagggttatatactgtagtcataataat

SEQ ID NO: 58182 - DNA, 50 bp, synthetic construct
  source 1..50: mol_type = other DNA
gcgcatggtcctctcgcgccgcctgtaggccggacagcaggtggcgcggc

SEQ ID NO: 58183 - DNA, 50 bp, synthetic construct
  source 1..50: mol_type = other DNA
ggtacatgtacaattcacctcttcatggtgaggttaacagtacatttctt

SEQ ID NO: 58184 - DNA, 50 bp, synthetic construct
  source 1..50: mol_type = other DNA
ttattcaacagttaaaaaatataaaagtcgtctttttacattggtaatag

SEQ ID NO: 58185 - DNA, 50 bp, synthetic construct
  source 1..50: mol_type = other DNA
catacagcccaaataaaaaatgattcatgcaaaattatttcagcgtgcaa

SEQ ID NO: 58186 - DNA, 50 bp, synthetic construct
  source 1..50: mol_type = other DNA
ttataatcattttctattctattttttgatagaatagttagtgtaagaaa

SEQ ID NO: 58187 - DNA, 50 bp, synthetic construct
  source 1..50: mol_type = other DNA
tccggttgtaactatgaacatggcctccctccttgggtaggtcggcgggg

SEQ ID NO: 58188 - DNA, 50 bp, synthetic construct
  source 1..50: mol_type = other DNA
tgcagtgtttttacaaacttattaatgtagtgaatgtaaaaaacaataca

SEQ ID NO: 58189 - DNA, 50 bp, synthetic construct
  source 1..50: mol_type = other DNA
tattaattttataaactattttattaccttttaagttaataaatataaaa

SEQ ID NO: 58190 - DNA, 50 bp, synthetic construct
  source 1..50: mol_type = other DNA
tggctacataaatatcttgttctaattagaagatttctttaatttagcca

SEQ ID NO: 58191 - DNA, 50 bp, synthetic construct
  source 1..50: mol_type = other DNA
gagctgtagatgaaattagaatagatttatgtgaagctcaaattctccta

SEQ ID NO: 58192 - DNA, 50 bp, synthetic construct
  source 1..50: mol_type = other DNA
ctcatggaacgttttccgtacccgatgatgtgccgaaagcattataccat

SEQ ID NO: 58193 - DNA, 50 bp, synthetic construct
  source 1..50: mol_type = other DNA
cgaatgattccaatgactgaagaattttatattatcatttacttcattcc

SEQ ID NO: 58194 - DNA, 50 bp, synthetic construct
  source 1..50: mol_type = other DNA
caacgcttagaaatcttgataccttcctaataagagatactaaatcgcta

SEQ ID NO: 58195 - DNA, 50 bp, synthetic construct
  source 1..50: mol_type = other DNA
gcgtgggccccacggtctggggctcgagctggccgaggtgtacccgtacg

SEQ ID NO: 58196 - DNA, 50 bp, synthetic construct
  source 1..50: mol_type = other DNA
tctttgtgatccgacccttcgatcgcgaaagccgggtcgctccccgatag

SEQ ID NO: 58197 - DNA, 50 bp, synthetic construct
  source 1..50: mol_type = other DNA
tgcggcgtcatcggtctcgtacacgacggtgcgagaccattccgaattca

SEQ ID NO: 58198 - DNA, 50 bp, synthetic construct
  source 1..50: mol_type = other DNA
tattgtcttgattttacttctgcaagacagacagctaaggcacgccaata

SEQ ID NO: 58199 - DNA, 50 bp, synthetic construct
  source 1..50: mol_type = other DNA
tgatccagacttgggtgttgtcggcgccgagtgcagacacagctatgtga

SEQ ID NO: 58200 - DNA, 50 bp, synthetic construct
  source 1..50: mol_type = other DNA
gcacttcggagtagatataagtacgaccactactatacactccgcaacca

SEQ ID NO: 58201 - DNA, 50 bp, synthetic construct
  source 1..50: mol_type = other DNA
cgcggcggcataggcgagcggcaggcggctttgtcgcaagtaccgccgcg

SEQ ID NO: 58202 - DNA, 50 bp, synthetic construct
  source 1..50: mol_type = other DNA
gaggtacaaaacatttattggaattaaatgatataattgttttattttta

SEQ ID NO: 58203 - DNA, 50 bp, synthetic construct
  source 1..50: mol_type = other DNA
gagctactcgtcccctccccggccatgaccgtgacctggacgcggtcgta

SEQ ID NO: 58204 - DNA, 50 bp, synthetic construct
  source 1..50: mol_type = other DNA
caaccttctagtttttgtttgtataaataagaaaaaaaagccccgttatg

SEQ ID NO: 58205 - DNA, 50 bp, synthetic construct
  source 1..50: mol_type = other DNA
cctgcccaactacttccagcttggcgcttccatgggcatcatggggcagt

SEQ ID NO: 58206 - DNA, 50 bp, synthetic construct
  source 1..50: mol_type = other DNA
tgttgtcttaaattgcggaattccatgcgattaaaagctttaattgctca

SEQ ID NO: 58207 - DNA, 50 bp, synthetic construct
  source 1..50: mol_type = other DNA
accatctacccaattctgctcctcatacgggcattaaacgaccaaagaca

SEQ ID NO: 58208 - DNA, 50 bp, synthetic construct
  source 1..50: mol_type = other DNA
agtaaccacaataccggcgacgctgactaaattttggtattgtagttggt

SEQ ID NO: 58209 - DNA, 50 bp, synthetic construct
  source 1..50: mol_type = other DNA
tgttttgtagattcacctgttcaagtgagaaacattggtcgtccaaaaga

SEQ ID NO: 58210 - DNA, 50 bp, synthetic construct
  source 1..50: mol_type = other DNA
tggaacacatccttggcctgatccggcatctcggccgaggtgctgatccg

SEQ ID NO: 58211 - DNA, 50 bp, synthetic construct
  source 1..50: mol_type = other DNA
acggacagattgaggagccgggcgattctccagctccgcctctcgacagt

SEQ ID NO: 58212 - DNA, 50 bp, synthetic construct
  source 1..50: mol_type = other DNA
actcaatagattaatcggggctgaatcagagccggatagatcgattgact

SEQ ID NO: 58213 - DNA, 50 bp, synthetic construct
  source 1..50: mol_type = other DNA
taccctccaaaattttcagaacgattgctttttaagaatttctgactatc

SEQ ID NO: 58214 - DNA, 50 bp, synthetic construct
  source 1..50: mol_type = other DNA
agggattcaagaagttgaaacgcttgagctctacagggcaaccaatccct

SEQ ID NO: 58215 - DNA, 50 bp, synthetic construct
  source 1..50: mol_type = other DNA
cggcggggcagccttgttctttctgcgccataatttatccgcgcccatcg

SEQ ID NO: 58216 - DNA, 50 bp, synthetic construct
  source 1..50: mol_type = other DNA
attttaatgagattcatatgaataattattgctataagacttgataaata

SEQ ID NO: 58217 - DNA, 50 bp, synthetic construct
  source 1..50: mol_type = other DNA
aatgaactttttagaatttaaaaatagatataaagaagaaggagttttac

SEQ ID NO: 58218 - DNA, 50 bp, synthetic construct
  source 1..50: mol_type = other DNA
tctttttgataaataccttgtaggaacctaatgaggatttgttaaaagga

SEQ ID NO: 58219 - DNA, 50 bp, synthetic construct
  source 1..50: mol_type = other DNA
aaaactaaataactggtaaattatataaactaaagaagttattaggttta

SEQ ID NO: 58220 - DNA, 50 bp, synthetic construct
  source 1..50: mol_type = other DNA
agtcattaatatttctttccagttagtcctagcgcggtcgctacgcgact

SEQ ID NO: 58221 - DNA, 50 bp, synthetic construct
  source 1..50: mol_type = other DNA
cggtgtacatactttacctactacgagcagtcgtgctagtatgtacgcca

SEQ ID NO: 58222 - DNA, 50 bp, synthetic construct
  source 1..50: mol_type = other DNA
cataacggggcttttttttcttatttatacaaacaaaaactagaaggttg

SEQ ID NO: 58223 - DNA, 50 bp, synthetic construct
  source 1..50: mol_type = other DNA
cttgttatcaacattctctaaccaaatgaggtaactacctttctaaatct

SEQ ID NO: 58224 - DNA, 50 bp, synthetic construct
  source 1..50: mol_type = other DNA
agatataatcgtttgtaggaggatttatatgtttacttcgaatcaatcaa

SEQ ID NO: 58225 - DNA, 50 bp, synthetic construct
  source 1..50: mol_type = other DNA
ataagatttaataacataagtagaaatatagtcttgttatcggataataa

SEQ ID NO: 58226 - DNA, 50 bp, synthetic construct
  source 1..50: mol_type = other DNA
acatacacttcaccctttttagaaatatataataagggggaatcttatga

SEQ ID NO: 58227 - DNA, 50 bp, synthetic construct
  source 1..50: mol_type = other DNA
ttcataaaaaataatatataaattataatttacttattttttattaacct

SEQ ID NO: 58228 - DNA, 50 bp, synthetic construct
  source 1..50: mol_type = other DNA
aaattttaagtatataaattcataattgtatatttatctatttcaatttt

SEQ ID NO: 58229 - DNA, 50 bp, synthetic construct
  source 1..50: mol_type = other DNA
tgtgtccgtttataatcaattatatatataattttaggggaactttcact

SEQ ID NO: 58230 - DNA, 50 bp, synthetic construct
  source 1..50: mol_type = other DNA
agctagctcagtgaaaatggagtaattgaaacataatcacgcctttagca

SEQ ID NO: 58231 - DNA, 50 bp, synthetic construct
  source 1..50: mol_type = other DNA
ggtcgcttttaggcactccttgactcatcgaggaatgcctaaaggcgaca

SEQ ID NO: 58232 - DNA, 50 bp, synthetic construct
  source 1..50: mol_type = other DNA
taccgataacctcatgaagttaattcattgacatcatgatgttatcggtt

SEQ ID NO: 58233 - DNA, 50 bp, synthetic construct
  source 1..50: mol_type = other DNA
ataaaaggatcgtcataaagctgtttttaccattatgaaaagctttccat

SEQ ID NO: 58234 - DNA, 50 bp, synthetic construct
  source 1..50: mol_type = other DNA
aaggtttatcgggcattagctgtgctcactactaagcttttctcgccatt

SEQ ID NO: 58235 - DNA, 50 bp, synthetic construct
  source 1..50: mol_type = other DNA
ggacagtcgagtctggatccgtccgctgagcgatcccgggcgaagtgtgg

SEQ ID NO: 58236 - DNA, 50 bp, synthetic construct
  source 1..50: mol_type = other DNA
ttcaaaggctaatgtcaagcatttttaaatgataatcaattgcatgggag

SEQ ID NO: 58237 - DNA, 50 bp, synthetic construct
  source 1..50: mol_type = other DNA
ctaacgtatgcttttataaaccttagaattttcataaacccaaactcctt

SEQ ID NO: 58238 - DNA, 50 bp, synthetic construct
  source 1..50: mol_type = other DNA
aattcagtaagttttttgatttaagtgtaaagcataacgtctgctatctt

SEQ ID NO: 58239 - DNA, 50 bp, synthetic construct
  source 1..50: mol_type = other DNA
taaaaagctcacatttacttcctatacaggcagagttattgagctattgc

SEQ ID NO: 58240 - DNA, 50 bp, synthetic construct
  source 1..50: mol_type = other DNA
acagctatcaagttatgaaaaccaagtggttttacccactacagaaatta

SEQ ID NO: 58241 - DNA, 50 bp, synthetic construct
  source 1..50: mol_type = other DNA
ttgttgtttcgtggtataataaaacttttttctatactcaaaaaggctcc

SEQ ID NO: 58242 - DNA, 50 bp, synthetic construct
  source 1..50: mol_type = other DNA
tggtccagcctttcgccgatctcggccgccatcgccgccgacgccgatac

SEQ ID NO: 58243 - DNA, 50 bp, synthetic construct
  source 1..50: mol_type = other DNA
cattgcagccaaagtttcctccgcgcgcacacaagccttccaatgcgaag

SEQ ID NO: 58244 - DNA, 50 bp, synthetic construct
  source 1..50: mol_type = other DNA
ccatcaccatatgagatttattatcaataatggttctcattaacgggggt

SEQ ID NO: 58245 - DNA, 50 bp, synthetic construct
  source 1..50: mol_type = other DNA
agaaggctccagattctctctggtaaaacagtgagaacgaagctggcgct

SEQ ID NO: 58246 - DNA, 50 bp, synthetic construct
  source 1..50: mol_type = other DNA
ctccgagttcggacttcgtcctctcttcccgtcttgccaaatgctcgcaa

SEQ ID NO: 58247 - DNA, 50 bp, synthetic construct
  source 1..50: mol_type = other DNA
cggcgggatataatgaggtggcgcggccgacatggtcgctcgcgccgccc

SEQ ID NO: 58248 - DNA, 50 bp, synthetic construct
  source 1..50: mol_type = other DNA
agcgttactgttagcattggtgacgtatcaaagtttctaaacgttgtcct

SEQ ID NO: 58249 - DNA, 50 bp, synthetic construct
  source 1..50: mol_type = other DNA
atgtatgttactagcagcttcatatctgtgaagtctcttttcagggaact

SEQ ID NO: 58250 - DNA, 50 bp, synthetic construct
  source 1..50: mol_type = other DNA
gtactgtcttggcatagtattaatggagaagccatatgaaagtccgaatc

SEQ ID NO: 58251 - DNA, 50 bp, synthetic construct
  source 1..50: mol_type = other DNA
ggtggcgatgcgctatctgattggcgcggtaatgatactggcacagcact

SEQ ID NO: 58252 - DNA, 50 bp, synthetic construct
  source 1..50: mol_type = other DNA
atgtatgtcgctagcaacttcatatctgaaaagttactgtacagatttta

SEQ ID NO: 58253 - DNA, 50 bp, synthetic construct
  source 1..50: mol_type = other DNA
tctcttttaatcaacgccaggcattaattcatttacgaaagaaaaatagg

SEQ ID NO: 58254 - DNA, 50 bp, synthetic construct
  source 1..50: mol_type = other DNA
taagttattaggtataaatgattataccgataattatacccttgaaaccg

SEQ ID NO: 58255 - DNA, 50 bp, synthetic construct
  source 1..50: mol_type = other DNA
gcttttaacatagcctcataatcttttgcggtctggtcgatgataaaagg

SEQ ID NO: 58256 - DNA, 50 bp, synthetic construct
  source 1..50: mol_type = other DNA
ttaaagaagctgtactttcattgatttcaaagaaagtaaaaaagtcttat

SEQ ID NO: 58257 - DNA, 50 bp, synthetic construct
  source 1..50: mol_type = other DNA
ccttattatagtattgattttaattgtttccaataaagtaaataagaagg

SEQ ID NO: 58258 - DNA, 50 bp, synthetic construct
  source 1..50: mol_type = other DNA
tgtgagggttcactgagtactttttaatccgctatcagtcaacttgttca

SEQ ID NO: 58259 - DNA, 50 bp, synthetic construct
  source 1..50: mol_type = other DNA
gccgccgttttttgcgcagaaatggaaatgttgccctctgaaaaggcggc

SEQ ID NO: 58260 - DNA, 50 bp, synthetic construct
  source 1..50: mol_type = other DNA
gtttttcagctggacctgagtgcctttgaaatactggccatctataaatc

SEQ ID NO: 58261 - DNA, 50 bp, synthetic construct
  source 1..50: mol_type = other DNA
ataaaatgggtacaagaaaagacatcagctgttacctgaaccttgtttat

SEQ ID NO: 58262 - DNA, 50 bp, synthetic construct
  source 1..50: mol_type = other DNA
atgaacctataaacgttatggctaattttcccaagtttttatgcagtaat

SEQ ID NO: 58263 - DNA, 50 bp, synthetic construct
  source 1..50: mol_type = other DNA
taaatagtcaatcagcattgaagttaacttcttgctttttttcgtatttt

SEQ ID NO: 58264 - DNA, 50 bp, synthetic construct
  source 1..50: mol_type = other DNA
aattgcacttttaagattcaattaatcaatttcgcgatttctctgcatgc

SEQ ID NO: 58265 - DNA, 50 bp, synthetic construct
  source 1..50: mol_type = other DNA
gaagtgttagtcaaagcctttgctaacagtaacgctggtcgagtagcttc

SEQ ID NO: 58266 - DNA, 50 bp, synthetic construct
  source 1..50: mol_type = other DNA
tactatgatattaactatcgagcaaggtgctgccggtggtgaacacgcag

SEQ ID NO: 58267 - DNA, 50 bp, synthetic construct
  source 1..50: mol_type = other DNA
ttaaaaagacaattacgatcacactacggtgaatgtcagtgtcagcgtcc

SEQ ID NO: 58268 - DNA, 50 bp, synthetic construct
  source 1..50: mol_type = other DNA
ttcaaccaccacatatagtgttaaagagttcagagattgctttgatgtaa

SEQ ID NO: 58269 - DNA, 50 bp, synthetic construct
  source 1..50: mol_type = other DNA
tgtgattgcttgagacttttcaatcttttgtaacatttcaaacgctcaca

SEQ ID NO: 58270 - DNA, 50 bp, synthetic construct
  source 1..50: mol_type = other DNA
aaaatttttgcttaatttatttggaaaaaactctcttacttcttgagctt

SEQ ID NO: 58271 - DNA, 50 bp, synthetic construct
  source 1..50: mol_type = other DNA
aacgttggcattcattttacacctccaggaataaaatgaatgacgcgatc

SEQ ID NO: 58272 - DNA, 50 bp, synthetic construct
  source 1..50: mol_type = other DNA
tacattttggaaccattcttaaataaattcaagatagaaacgaaaaaact

SEQ ID NO: 58273 - DNA, 50 bp, synthetic construct
  source 1..50: mol_type = other DNA
gggggtgatggggtgttttgatgggtcctgcaagacccgcccgtgcccac

SEQ ID NO: 58274 - DNA, 50 bp, synthetic construct
  source 1..50: mol_type = other DNA
acattgttttggttattgcgagcggcctgcaaaggccaccgaaaacagcg

SEQ ID NO: 58275 - DNA, 50 bp, synthetic construct
  source 1..50: mol_type = other DNA
taagccttcgcagaatcggcatccgtgaaaggtgatctcttgaatttata

SEQ ID NO: 58276 - DNA, 50 bp, synthetic construct
  source 1..50: mol_type = other DNA
gctattttcatttgaatcacctcgatcacaagaatttggatgaaattcgc

SEQ ID NO: 58277 - DNA, 50 bp, synthetic construct
  source 1..50: mol_type = other DNA
acaatcctgatctttcatgattttgataaatcatgagaagtaaggatatt

SEQ ID NO: 58278 - DNA, 50 bp, synthetic construct
  source 1..50: mol_type = other DNA
atagacgattttataaaatatttcaaaaaatattttttttattaaactct

SEQ ID NO: 58279 - DNA, 50 bp, synthetic construct
  source 1..50: mol_type = other DNA
gtgggatgagcggcttataaggtgcgcggcgcgacagcgcggcggccaga

SEQ ID NO: 58280 - DNA, 50 bp, synthetic construct
  source 1..50: mol_type = other DNA
cgcggcgatgaacccgtgccgctgcggctgcgcagggggcggaggccgcc

SEQ ID NO: 58281 - DNA, 50 bp, synthetic construct
  source 1..50: mol_type = other DNA
tcgtcgtcgtctccgcgggcatggacccgcgccggccgagagggtgaagc

SEQ ID NO: 58282 - DNA, 50 bp, synthetic construct
  source 1..50: mol_type = other DNA
tttttaaattaacaaaatttatatttatttagattttggacatttaaagt

SEQ ID NO: 58283 - DNA, 50 bp, synthetic construct
  source 1..50: mol_type = other DNA
cggcgagacctttcggcagcccgtcggcgggcgccggaggcctgacggtt

SEQ ID NO: 58284 - DNA, 50 bp, synthetic construct
  source 1..50: mol_type = other DNA
tcttggtaacagtcggactcacttaagcaggcgtccaaatgttaccaacg

SEQ ID NO: 58285 - DNA, 50 bp, synthetic construct
  source 1..50: mol_type = other DNA
aatcatgtccgccaacccctggcgcactcaagggtttgccagtgtgcagg

SEQ ID NO: 58286 - DNA, 50 bp, synthetic construct
  source 1..50: mol_type = other DNA
ttccaggaagtgtttgagtttctggtaagtagctcctagtttccctggtg

SEQ ID NO: 58287 - DNA, 50 bp, synthetic construct
  source 1..50: mol_type = other DNA
aactgccgagcaggccgcctactacggtgtgtaaggcgcgtgtggcagga

SEQ ID NO: 58288 - DNA, 50 bp, synthetic construct
  source 1..50: mol_type = other DNA
caaacttacctgctttgtactggttaataatgctggtacaggtagtactt

SEQ ID NO: 58289 - DNA, 50 bp, synthetic construct
  source 1..50: mol_type = other DNA
caaatgcacatatgatttatcaggtttcgtatattagatattaacaagga

SEQ ID NO: 58290 - DNA, 50 bp, synthetic construct
  source 1..50: mol_type = other DNA
cgattctattatagaaatcatcaaattggaggtcaactattatgaatcgg

SEQ ID NO: 58291 - DNA, 50 bp, synthetic construct
  source 1..50: mol_type = other DNA
gataaatatttacaatattttcagttaattaaatataatcactatttact

SEQ ID NO: 58292 - DNA, 50 bp, synthetic construct
  source 1..50: mol_type = other DNA
cgcacaaaactcatcgatatcttttataactgcctaatctgttttgcact

SEQ ID NO: 58293 - DNA, 50 bp, synthetic construct
  source 1..50: mol_type = other DNA
ttttttctttatcatatatcctccaaaaatgatataataaaataaatgct

SEQ ID NO: 58294 - DNA, 50 bp, synthetic construct
  source 1..50: mol_type = other DNA
ttataattatgttaaaataattttttaaacttatttaattataaaaataa

SEQ ID NO: 58295 - DNA, 50 bp, synthetic construct
  source 1..50: mol_type = other DNA
tatgtcaataaatacttttttaaaaacgtaacggcttatttgaatcgcac

SEQ ID NO: 58296 - DNA, 50 bp, synthetic construct
  source 1..50: mol_type = other DNA
ttccatctactccgctgaaaaaccgcggagttacccctgatgtctacgaa

SEQ ID NO: 58297 - DNA, 50 bp, synthetic construct
  source 1..50: mol_type = other DNA
ccaagattattaaccatatctgcctcggatgatatcattagatgctgcct

SEQ ID NO: 58298 - DNA, 50 bp, synthetic construct
  source 1..50: mol_type = other DNA
gccatcgatagattcattaattcgggaatcacacttaatgaaacctaagc

SEQ ID NO: 58299 - DNA, 50 bp, synthetic construct
  source 1..50: mol_type = other DNA
ggtgatttaattgggtaaagtgagaatgatcaatatccattactagcatg

SEQ ID NO: 58300 - DNA, 50 bp, synthetic construct
  source 1..50: mol_type = other DNA
ttgtctgcattaataacgataacgaacgttacaacgatccaatcaaacaa

SEQ ID NO: 58301 - DNA, 50 bp, synthetic construct
  source 1..50: mol_type = other DNA
gtccgcgagagcggcctgcgcgcggaggtgcgcaggcccgcatcgcgcgc

SEQ ID NO: 58302 - DNA, 50 bp, synthetic construct
  source 1..50: mol_type = other DNA
aggacgcgataatggaaacgttattaacaataccaattcctaagcgtcta

SEQ ID NO: 58303 - DNA, 50 bp, synthetic construct
  source 1..50: mol_type = other DNA
tcactagcagcttcatatcttcggacattagtctttgaaactgctagtat

SEQ ID NO: 58304 - DNA, 50 bp, synthetic construct
  source 1..50: mol_type = other DNA
agccgtctgtgatcctctctcgccgctgcgcgggcggatcaaaatgcggt

SEQ ID NO: 58305 - DNA, 50 bp, synthetic construct
  source 1..50: mol_type = other DNA
cagggatgagaattggtgaagtgcttgcatcgacagtcctttcctccttt

SEQ ID NO: 58306 - DNA, 50 bp, synthetic construct
  source 1..50: mol_type = other DNA
aatattcaggatgtgcggcacgcaactaaatgcgccgaagcctggtcatt

SEQ ID NO: 58307 - DNA, 50 bp, synthetic construct
  source 1..50: mol_type = other DNA
ctgaattatgttgttggtgatgccggacgaacagcaagaacaagccccag

SEQ ID NO: 58308 - DNA, 50 bp, synthetic construct
  source 1..50: mol_type = other DNA
tgttcaaagcgtaaccgatagacagcctattgtcgggtgtccaccgacca

SEQ ID NO: 58309 - DNA, 50 bp, synthetic construct
  source 1..50: mol_type = other DNA
aattttatcctttttactgcggtgtacaccacagttaatggaggtaagta

SEQ ID NO: 58310 - DNA, 50 bp, synthetic construct
  source 1..50: mol_type = other DNA
gcttgtattggttcatcgaccggtgaggctgtctgtgaatcctcacaagc

SEQ ID NO: 58311 - DNA, 50 bp, synthetic construct
  source 1..50: mol_type = other DNA
ctaaaactaaaattatatcaagatgataacttgactaatattccctttag

SEQ ID NO: 58312 - DNA, 50 bp, synthetic construct
  source 1..50: mol_type = other DNA
aattgctgatcaatttgccgtttagctaaagaacagggtgttcaaggcta

SEQ ID NO: 58313 - DNA, 50 bp, synthetic construct
  source 1..50: mol_type = other DNA
tggtacacctacccgctttggcaacaataccaattcctaagcgtctacct

SEQ ID NO: 58314 - DNA, 50 bp, synthetic construct
  source 1..50: mol_type = other DNA
gatatgccagagtttcgaccgatcatgaccggctgaagccgggctgtttc

SEQ ID NO: 58315 - DNA, 50 bp, synthetic construct
  source 1..50: mol_type = other DNA
atttcaccgcatcaacctctcggcactcaaagaaggaggcgcataccgat

SEQ ID NO: 58316 - DNA, 50 bp, synthetic construct
  source 1..50: mol_type = other DNA
cgcccatcacggcgtactctttctcgagaaatatcgtcccgtcatcgggc

SEQ ID NO: 58317 - DNA, 50 bp, synthetic construct
  source 1..50: mol_type = other DNA
aacaaagcggatgaagattggtactcgctccctccttccgacactttgtt

SEQ ID NO: 58318 - DNA, 50 bp, synthetic construct
  source 1..50: mol_type = other DNA
cgcggacgctgcgcgagatcctgggcagttggtagcgcgcttccatggca

SEQ ID NO: 58319 - DNA, 50 bp, synthetic construct
  source 1..50: mol_type = other DNA
atcaccttataaataatacttaattaggctgcgattattttattttgaaa

SEQ ID NO: 58320 - DNA, 50 bp, synthetic construct
  source 1..50: mol_type = other DNA
gaatcaaatcagtgctggtcatcgttggacgacatgctgtctgttgtcgc

SEQ ID NO: 58321 - DNA, 50 bp, synthetic construct
  source 1..50: mol_type = other DNA
gttttaatagaagaaattaaaaataacgcttatatgtcgccatcttgagg

SEQ ID NO: 58322 - DNA, 50 bp, synthetic construct
  source 1..50: mol_type = other DNA
caagctccttggcggtggccaggaggcacttgccaggcgacaggctcgcc

SEQ ID NO: 58323 - DNA, 50 bp, synthetic construct
  source 1..50: mol_type = other DNA
acatcagctttcctgattatacagttgattgtaatcaataacattgatga

SEQ ID NO: 58324 - DNA, 50 bp, synthetic construct
  source 1..50: mol_type = other DNA
ggaacatttgttctgtttatattttaacccaaaaaccgaacatacattct

SEQ ID NO: 58325 - DNA, 50 bp, synthetic construct
  source 1..50: mol_type = other DNA
gctttttattgcttaatcaaactgatggatttgatttcacaatgctatcc

SEQ ID NO: 58326 - DNA, 50 bp, synthetic construct
  source 1..50: mol_type = other DNA
tgaagccgtgacgaagaagctggagcactttggcgaagttcatcgccggt

SEQ ID NO: 58327 - DNA, 50 bp, synthetic construct
  source 1..50: mol_type = other DNA
ataacccagaatccctatcagtttaaaagctgcgccgtatgatcggttag

SEQ ID NO: 58328 - DNA, 50 bp, synthetic construct
  source 1..50: mol_type = other DNA
gtaaaaatattttacagcacatagggctaccagaggtataatataggtgt

SEQ ID NO: 58329 - DNA, 50 bp, synthetic construct
  source 1..50: mol_type = other DNA
tgcaactctattgacagcattccatttggagtgctgtcgtagcaaatgtg

SEQ ID NO: 58330 - DNA, 50 bp, synthetic construct
  source 1..50: mol_type = other DNA
acatttccgacttttttaattttcctcaaacttgtatccgtagggaatgt

SEQ ID NO: 58331 - DNA, 50 bp, synthetic construct
  source 1..50: mol_type = other DNA
ctgctgcaccaatgcaacattggccggcttcgcagttattggggtgggta

SEQ ID NO: 58332 - DNA, 50 bp, synthetic construct
  source 1..50: mol_type = other DNA
gaggtgtaggacagcatgaaaaagagctttttaagtaattccattttttg

SEQ ID NO: 58333 - DNA, 50 bp, synthetic construct
  source 1..50: mol_type = other DNA
gctattgaaaaagcgtgagagttcggtgctgcaaacgcttttcgtataca

SEQ ID NO: 58334 - DNA, 50 bp, synthetic construct
  source 1..50: mol_type = other DNA
ttcggtcgctttcaaagcgacaagttgttgtcacggaggaagcgacgtac

SEQ ID NO: 58335 - DNA, 50 bp, synthetic construct
  source 1..50: mol_type = other DNA
tgcgcattcaggagagcgcctaaaacggtaggggcgtttttgtttggaaa

SEQ ID NO: 58336 - DNA, 50 bp, synthetic construct
  source 1..50: mol_type = other DNA
tgttgtcagcatatttttcgcttgtatcatctcaaatgaggctgacaacg

SEQ ID NO: 58337 - DNA, 50 bp, synthetic construct
  source 1..50: mol_type = other DNA
taggatttcgtttataaaaatacaaactcccaagtatcaccccaatagat

SEQ ID NO: 58338 - DNA, 50 bp, synthetic construct
  source 1..50: mol_type = other DNA
cgttacatctagaggggtctgctatctggcggacccctctacatgtaaca

SEQ ID NO: 58339 - DNA, 50 bp, synthetic construct
  source 1..50: mol_type = other DNA
tacatacgtgataatgttgcataatattgagatacattatcacgctgagg

SEQ ID NO: 58340 - DNA, 50 bp, synthetic construct
  source 1..50: mol_type = other DNA
ttacctgctttgtactggttaagcgtgtttaataatgctggtacaggtag

SEQ ID NO: 58341 - DNA, 50 bp, synthetic construct
  source 1..50: mol_type = other DNA
acgatattctctaaataagacactataatcatttacgtcgagtctatcac

SEQ ID NO: 58342 - DNA, 50 bp, synthetic construct
  source 1..50: mol_type = other DNA
tcgacagaggcttgatctggctatccatgcgcaacagaagaccatgtcga

SEQ ID NO: 58343 - DNA, 50 bp, synthetic construct
  source 1..50: mol_type = other DNA
ttattagaggtttataattttttattagttaaggtattaacctctaagta

SEQ ID NO: 58344 - DNA, 50 bp, synthetic construct
  source 1..50: mol_type = other DNA
tcctataggatcttggagatatacctatcattaatatagatagtattttt

SEQ ID NO: 58345 - DNA, 50 bp, synthetic construct
  source 1..50: mol_type = other DNA
acaatatcagtcagggatagaactggtggggttaaattgactgacattaa

SEQ ID NO: 58346 - DNA, 50 bp, synthetic construct
  source 1..50: mol_type = other DNA
gattgaattctcgccagtgattcgacttggcgttacacgaaaattcaaga

SEQ ID NO: 58347 - DNA, 50 bp, synthetic construct
  source 1..50: mol_type = other DNA
agtcgctccttttcttaaaaaagaaaaaagcttcccggaaaggagcgttt

SEQ ID NO: 58348 - DNA, 50 bp, synthetic construct
  source 1..50: mol_type = other DNA
tcatgcagagcgagcgggcaatcgccggatggccccttagctcagctgga

SEQ ID NO: 58349 - DNA, 50 bp, synthetic construct
  source 1..50: mol_type = other DNA
ccttttgatctgcgccagcataggaagacatgcgctctcccggagagagg

SEQ ID NO: 58350 - DNA, 50 bp, synthetic construct
  source 1..50: mol_type = other DNA
gttgggcagcaaacggaacgcaaacagatgtgttccaagcgttgaaacac

SEQ ID NO: 58351 - DNA, 50 bp, synthetic construct
  source 1..50: mol_type = other DNA
gaatttattctcatccttgcgggataatccttggttagtcgaatcatcta

SEQ ID NO: 58352 - DNA, 50 bp, synthetic construct
  source 1..50: mol_type = other DNA
accaactaaatttttttaaaaaatttaaaactataaagaaaacgtatatt

SEQ ID NO: 58353 - DNA, 50 bp, synthetic construct
  source 1..50: mol_type = other DNA
ttctttttttatattaaaaatactataagactttagtaaaaaaattggat

SEQ ID NO: 58354 - DNA, 50 bp, synthetic construct
  source 1..50: mol_type = other DNA
tttttttaatcaaaaaatctgtttttttttaatttttttgggtaaaaatc

SEQ ID NO: 58355 - DNA, 50 bp, synthetic construct
  source 1..50: mol_type = other DNA
taataattcgtctgctttttcataattttgaaaaatatgatagtctataa

SEQ ID NO: 58356 - DNA, 50 bp, synthetic construct
  source 1..50: mol_type = other DNA
gttaaaccttctaatttttgtttgtacaaagaagaataccaagcgataaa

SEQ ID NO: 58357 - DNA, 50 bp, synthetic construct
  source 1..50: mol_type = other DNA
ttcttgagtaacgggctcgccatttccttggtgagcgcgtcaacctttgc

SEQ ID NO: 58358 - DNA, 50 bp, synthetic construct
  source 1..50: mol_type = other DNA
cgatgacaataacctcattatgcctcgggctcataacccgaaggtcatcg

SEQ ID NO: 58359 - DNA, 50 bp, synthetic construct
  source 1..50: mol_type = other DNA
taccagcattactaagcacctttgaagaaacatcctgcgttctggtgtag

SEQ ID NO: 58360 - DNA, 50 bp, synthetic construct
  source 1..50: mol_type = other DNA
ccaaatgattaatactacttgtttcttaacaatttcttttattcattaaa

SEQ ID NO: 58361 - DNA, 50 bp, synthetic construct
  source 1..50: mol_type = other DNA
cattaaaaccaatttttttatataaatatatggaggaattcttatgaaaa

SEQ ID NO: 58362 - DNA, 50 bp, synthetic construct
  source 1..50: mol_type = other DNA
accttcatctatatcactccttgcctccaaatacatattcatatgagtta

SEQ ID NO: 58363 - DNA, 50 bp, synthetic construct
  source 1..50: mol_type = other DNA
ttttacaagagttggagaattttatttttatttgcataaaatacatattg

SEQ ID NO: 58364 - DNA, 50 bp, synthetic construct
  source 1..50: mol_type = other DNA
tgaagggagataaaggcgatcctggcaaggatcgttttagcgcataatca

SEQ ID NO: 58365 - DNA, 50 bp, synthetic construct
  source 1..50: mol_type = other DNA
gtcatttataagaaaagtgcctacttcctggagcttttcttatattttta

SEQ ID NO: 58366 - DNA, 50 bp, synthetic construct
  source 1..50: mol_type = other DNA
aaatcaccatctttactagttataattgtagctagtaaagactacatttc

SEQ ID NO: 58367 - DNA, 50 bp, synthetic construct
  source 1..50: mol_type = other DNA
ggcggtgtggggggtgaggaggaggccagcagtccgcggccggggccgcc

SEQ ID NO: 58368 - DNA, 50 bp, synthetic construct
  source 1..50: mol_type = other DNA
ccatgtacaaacatcctttggttttttgagcaggagatctttggactgga

SEQ ID NO: 58369 - DNA, 50 bp, synthetic construct
  source 1..50: mol_type = other DNA
aaaaaatcatagactaaagtgatcaagatccttttatcaggtgaatcccg

SEQ ID NO: 58370 - DNA, 50 bp, synthetic construct
  source 1..50: mol_type = other DNA
aaacacatgataccaataaggtagatcaagattacttacttagatctttt

SEQ ID NO: 58371 - DNA, 50 bp, synthetic construct
  source 1..50: mol_type = other DNA
ggtagtttcgtatatacacatttgttcaaatgtgtatatacgaagccaag

SEQ ID NO: 58372 - DNA, 50 bp, synthetic construct
  source 1..50: mol_type = other DNA
ggcatgtatttattcagtgccgcccagaaggaactctccaaggacaacat

SEQ ID NO: 58373 - DNA, 50 bp, synthetic construct
  source 1..50: mol_type = other DNA
ctatcaagtttgtggccgttgccacgtgacaatatgcacgaactggcaaa

SEQ ID NO: 58374 - DNA, 50 bp, synthetic construct
  source 1..50: mol_type = other DNA
tccacgcaaaggaatgtattgtagacctccaatctgtttactttattgct

SEQ ID NO: 58375 - DNA, 50 bp, synthetic construct
  source 1..50: mol_type = other DNA
agcgaacatgaaagatatgctctgaagggcgatgctcttttatgtaggct

SEQ ID NO: 58376 - DNA, 50 bp, synthetic construct
  source 1..50: mol_type = other DNA
tttctgcaattacatttacagcagcacacagcctgatacaaaatcaaaaa

SEQ ID NO: 58377 - DNA, 50 bp, synthetic construct
  source 1..50: mol_type = other DNA
cctgtcgtaccggggccgcggcgacgatttggccgatccagtactccaga

SEQ ID NO: 58378 - DNA, 50 bp, synthetic construct
  source 1..50: mol_type = other DNA
aaaaaaggctggcattttttactcatgtgtaccatccgctacatttacgc

SEQ ID NO: 58379 - DNA, 50 bp, synthetic construct
  source 1..50: mol_type = other DNA
agatggtatttaacatttatgcctgtaataattacatttaaatattaaga

SEQ ID NO: 58380 - DNA, 50 bp, synthetic construct
  source 1..50: mol_type = other DNA
tccgggtggaaagaggtttctatttataataactcctctctcccccagcg

SEQ ID NO: 58381 - DNA, 50 bp, synthetic construct
  source 1..50: mol_type = other DNA
gagtgtagaaaaaacagaggaaagaggtttctatttattcgattagattt

SEQ ID NO: 58382 - DNA, 50 bp, synthetic construct
  source 1..50: mol_type = other DNA
tattcaatcaaggtcaccaaaaaaatcttttaatggaaccggatgtaatg

SEQ ID NO: 58383 - DNA, 50 bp, synthetic construct
  source 1..50: mol_type = other DNA
tattgatcgacctgaatatggcggggccgccatcacatgcaggttcgtgt

SEQ ID NO: 58384 - DNA, 50 bp, synthetic construct
  source 1..50: mol_type = other DNA
agcaccgcgcagtccagttcatggcgcagcgctatggacagggcggctgt

SEQ ID NO: 58385 - DNA, 50 bp, synthetic construct
  source 1..50: mol_type = other DNA
gtgtatcaatagaaaggtctcttcagaattatacctttcttatgatacac

SEQ ID NO: 58386 - DNA, 50 bp, synthetic construct
  source 1..50: mol_type = other DNA
actcctcacaaaatgataataattataattaatatcatttactggcgatt

SEQ ID NO: 58387 - DNA, 50 bp, synthetic construct
  source 1..50: mol_type = other DNA
aaaatttcctaaaaaatgataaaatgctttatcttttttttataggttgc

SEQ ID NO: 58388 - DNA, 50 bp, synthetic construct
  source 1..50: mol_type = other DNA
aattgatatagagttgtaatctttagaacacgaacataccccagtcttag

SEQ ID NO: 58389 - DNA, 50 bp, synthetic construct
  source 1..50: mol_type = other DNA
tcaaccgtgctatagtaagaaagttatctttctgcgcacttcacggtgcg

SEQ ID NO: 58390 - DNA, 50 bp, synthetic construct
  source 1..50: mol_type = other DNA
acgtttttattgcgaagccgcatccggtattgtcttcagtataatgggtt

SEQ ID NO: 58391 - DNA, 50 bp, synthetic construct
  source 1..50: mol_type = other DNA
aaaaataattataaggaaactattatgaaagttcccgtatggtgttatgc

SEQ ID NO: 58392 - DNA, 50 bp, synthetic construct
  source 1..50: mol_type = other DNA
acttccgtaaagcattacccgacttaagaagcctatgggtaagcaagccc

SEQ ID NO: 58393 - DNA, 50 bp, synthetic construct
  source 1..50: mol_type = other DNA
tgtaacgtatggtgaccaaacatcatgggagtttatcaccatgagacacg

SEQ ID NO: 58394 - DNA, 50 bp, synthetic construct
  source 1..50: mol_type = other DNA
tatgtattatggtagaatagggtatatacctaatcatgccaatataaaca

SEQ ID NO: 58395 - DNA, 50 bp, synthetic construct
  source 1..50: mol_type = other DNA
aattatactaaaatactcccgtttagaaaaatcaggtttttattatcttt

SEQ ID NO: 58396 - DNA, 50 bp, synthetic construct
  source 1..50: mol_type = other DNA
gttttaaaaatctaaccatcaaacgtttttgagcgttatattgaaaacta

SEQ ID NO: 58397 - DNA, 50 bp, synthetic construct
  source 1..50: mol_type = other DNA
cattgacccgcttgaaatgatcaatatgcgtcatttcagatggggtttat

SEQ ID NO: 58398 - DNA, 50 bp, synthetic construct
  source 1..50: mol_type = other DNA
cggttgaggaggccagtcagcggatcgagacgcctatacctttgcgatgg

SEQ ID NO: 58399 - DNA, 50 bp, synthetic construct
  source 1..50: mol_type = other DNA
agttcgttttccgttcgggacgggcggccatcccgtatggcgaacaacgc

SEQ ID NO: 58400 - DNA, 50 bp, synthetic construct
  source 1..50: mol_type = other DNA
gcttgctggcgcttgataccagcaggcgcaggtcgcaaggcccgtcagga

SEQ ID NO: 58401 - DNA, 50 bp, synthetic construct
  source 1..50: mol_type = other DNA
ctggttccggaaatgcaaaaagcggcgtcgcgaacggcaccgttgaccag

SEQ ID NO: 58402 - DNA, 50 bp, synthetic construct
  source 1..50: mol_type = other DNA
gtgtatcataagaaagatgtaatcctgaagagacctttctattgatacac

SEQ ID NO: 58403 - DNA, 50 bp, synthetic construct
  source 1..50: mol_type = other DNA
gctagtaagttaccatgatagactaaatacaatcattgtatcttactatt

SEQ ID NO: 58404 - DNA, 50 bp, synthetic construct
  source 1..50: mol_type = other DNA
gggattgaatgcgggtagtaccgccggcggcaaccacctcatccacgccc

SEQ ID NO: 58405 - DNA, 50 bp, synthetic construct
  source 1..50: mol_type = other DNA
ataggaactttaatacatttatctgaagatatatgtattaaagtaaaact

SEQ ID NO: 58406 - DNA, 50 bp, synthetic construct
  source 1..50: mol_type = other DNA
ttacttatttttgttatatttctatgggagaaaataacacttgcaagcac

SEQ ID NO: 58407 - DNA, 50 bp, synthetic construct
  source 1..50: mol_type = other DNA
ggaaaggggacgaagattaccttaagtcgggtaatgctttacggaagttt

SEQ ID NO: 58408 - DNA, 50 bp, synthetic construct
  source 1..50: mol_type = other DNA
tcccaagttataccttgggtgcaatgaccttaccgaaatacaactttggt

SEQ ID NO: 58409 - DNA, 50 bp, synthetic construct
  source 1..50: mol_type = other DNA
agaataaaaatcaatgttatgttctaatacatattctatcattttcatct

SEQ ID NO: 58410 - DNA, 50 bp, synthetic construct
  source 1..50: mol_type = other DNA
aacttaaaaataatcaaaagctcttaaatcctttgaatataattaaaaga

SEQ ID NO: 58411 - DNA, 50 bp, synthetic construct
  source 1..50: mol_type = other DNA
tggtataaaaaactaattcatctattgatttgcattacaaatgattaaca

SEQ ID NO: 58412 - DNA, 50 bp, synthetic construct
  source 1..50: mol_type = other DNA
tgttggtgtaattagatttactccattgttttgatacagatccaccagca

SEQ ID NO: 58413 - DNA, 50 bp, synthetic construct
  source 1..50: mol_type = other DNA
tttttttcattgtatttttctttgtgctaagaaaatcagaaccgcgtatt

SEQ ID NO: 58414 - DNA, 50 bp, synthetic construct
  source 1..50: mol_type = other DNA
aattaataaaaaattcctgtttatggatgtattggaagagatgattaatg

SEQ ID NO: 58415 - DNA, 50 bp, synthetic construct
  source 1..50: mol_type = other DNA
tgaaatagatacccgtaagtattttaaagtacaaacacaagaagaatttt

SEQ ID NO: 58416 - DNA, 50 bp, synthetic construct
  source 1..50: mol_type = other DNA
tataggaaaattacccgaacaacgctaattgtgggggtaatattataatt

SEQ ID NO: 58417 - DNA, 50 bp, synthetic construct
  source 1..50: mol_type = other DNA
tctgctgttcatcgggacgggctccgacgccttctccgagaggtccgcga

SEQ ID NO: 58418 - DNA, 50 bp, synthetic construct
  source 1..50: mol_type = other DNA
gcgggaattctcgcggtcgcgctcatgttagcgacacgcaacatcaggag

SEQ ID NO: 58419 - DNA, 50 bp, synthetic construct
  source 1..50: mol_type = other DNA
atagatatctattatgaggttattatcggcagttcataactgagttcaat

SEQ ID NO: 58420 - DNA, 50 bp, synthetic construct
  source 1..50: mol_type = other DNA
gtacagcagtacacgctgtgtatagcaataggaagtagtgcggatcgtca

SEQ ID NO: 58421 - DNA, 50 bp, synthetic construct
  source 1..50: mol_type = other DNA
ctcctccatactccgaataatccatttatataattactagtatcaaggag

SEQ ID NO: 58422 - DNA, 50 bp, synthetic construct
  source 1..50: mol_type = other DNA
agaagaaaaatgaaaaattcattagcataaacgcttatatgtcgccatct

SEQ ID NO: 58423 - DNA, 50 bp, synthetic construct
  source 1..50: mol_type = other DNA
acaagcatatttgcttcctttttggtataatgtatgcaccataatttttt

SEQ ID NO: 58424 - DNA, 50 bp, synthetic construct
  source 1..50: mol_type = other DNA
ccggtgggacaaatcgttgttcctgcaacatcatcgatagcgcccagttc

SEQ ID NO: 58425 - DNA, 50 bp, synthetic construct
  source 1..50: mol_type = other DNA
caagtcaagctatttcgccgaaaatatttttggcacaggataggcagtaa

SEQ ID NO: 58426 - DNA, 50 bp, synthetic construct
  source 1..50: mol_type = other DNA
ccgtagtcaacagctctcaattgtatgatatcggctgcaagtgattacat

SEQ ID NO: 58427 - DNA, 50 bp, synthetic construct
  source 1..50: mol_type = other DNA
tggcttacattttgcaccaccgagacggctgttgtcgagaaagtaagcca

SEQ ID NO: 58428 - DNA, 50 bp, synthetic construct
  source 1..50: mol_type = other DNA
tgctcatctagtgtggcttctgaatgttttattcacatgttactaccgtc

SEQ ID NO: 58429 - DNA, 50 bp, synthetic construct
  source 1..50: mol_type = other DNA
gaccttcaggttatgagcctgacgagcagcggaatcataatccgcgtgtc

SEQ ID NO: 58430 - DNA, 50 bp, synthetic construct
  source 1..50: mol_type = other DNA
caggatgataaagccctgtccagcatgctagaggcctggttgcgcgagcc

SEQ ID NO: 58431 - DNA, 50 bp, synthetic construct
  source 1..50: mol_type = other DNA
aattcatcagatagaatgacatgtgtccaagttctttgatcgggtaaatc

SEQ ID NO: 58432 - DNA, 50 bp, synthetic construct
  source 1..50: mol_type = other DNA
ggtgagatctaatggcccgcaaggtccggcctgtgccgtgagatctatcc

SEQ ID NO: 58433 - DNA, 50 bp, synthetic construct
  source 1..50: mol_type = other DNA
ggcccgcaggtcgtcgcggatctccagagcgccgtgccaggaccgctgaa

SEQ ID NO: 58434 - DNA, 50 bp, synthetic construct
  source 1..50: mol_type = other DNA
attaacaataaaatattgtactaaatttagtacaatattttattataaaa

SEQ ID NO: 58435 - DNA, 50 bp, synthetic construct
  source 1..50: mol_type = other DNA
gcattgacaagtagtacacctgaatttttagtagagctacttctcaaccc

SEQ ID NO: 58436 - DNA, 50 bp, synthetic construct
  source 1..50: mol_type = other DNA
ggagcgtccagtcgaaagcggcaatattgccgtcggcgatgcgccgctct

SEQ ID NO: 58437 - DNA, 50 bp, synthetic construct
  source 1..50: mol_type = other DNA
caaaacaccgctcaccacttcgcgcatgctcatcaatccggcccgtgttg

SEQ ID NO: 58438 - DNA, 50 bp, synthetic construct
  source 1..50: mol_type = other DNA
caaacaaaacaacgaaaatcttgatttcactattcttcttgtttttcttg

SEQ ID NO: 58439 - DNA, 50 bp, synthetic construct
  source 1..50: mol_type = other DNA
tctggccgccggcgggacggcgttcgaacgtggtaagctcggttcccagt

SEQ ID NO: 58440 - DNA, 50 bp, synthetic construct
  source 1..50: mol_type = other DNA
gcgtgatgtcttcctgcttccatggccgccgaagaggttctgcagcaggc

SEQ ID NO: 58441 - DNA, 50 bp, synthetic construct
  source 1..50: mol_type = other DNA
tatgttccacctcgcttggacatggacatatcaaacggcttgccgcaatt

SEQ ID NO: 58442 - DNA, 50 bp, synthetic construct
  source 1..50: mol_type = other DNA
caaagtcaaacactcttgttgatgataatcaagaagatttgattacattg

SEQ ID NO: 58443 - DNA, 50 bp, synthetic construct
  source 1..50: mol_type = other DNA
caacgaagcccttcccccaaccgccgatatctggcggaactcgttcgtca

SEQ ID NO: 58444 - DNA, 50 bp, synthetic construct
  source 1..50: mol_type = other DNA
tccttgtgcttaggtatgattatttaaatcgctctacgagcttcctgtga

SEQ ID NO: 58445 - DNA, 50 bp, synthetic construct
  source 1..50: mol_type = other DNA
ttttcataagtggaatttaaattctgcaattagacgacgtattactaatt

SEQ ID NO: 58446 - DNA, 50 bp, synthetic construct
  source 1..50: mol_type = other DNA
gcgggctccggccgctgagctgctcgtcgggctcataacccgaaggtcgc

SEQ ID NO: 58447 - DNA, 50 bp, synthetic construct
  source 1..50: mol_type = other DNA
tcctgcaaaggccagacagaaacgctcgttccccgctggctgttattttt

SEQ ID NO: 58448 - DNA, 50 bp, synthetic construct
  source 1..50: mol_type = other DNA
cacggtgcgcccgtgatgccgccccggcgttcatactcgggcgcctcgtc

SEQ ID NO: 58449 - DNA, 50 bp, synthetic construct
  source 1..50: mol_type = other DNA
ggcctcataatgatacacggacaaagacggcgctgcgcaattgccaggcc

SEQ ID NO: 58450 - DNA, 50 bp, synthetic construct
  source 1..50: mol_type = other DNA
cgcgccattgaatcactccttgaacggccaaggtggcgcgtgcaagcgcg

SEQ ID NO: 58451 - DNA, 50 bp, synthetic construct
  source 1..50: mol_type = other DNA
aacccggctcagcttcccgccccctcgatcgcggcaagcgggggcggccc

SEQ ID NO: 58452 - DNA, 50 bp, synthetic construct
  source 1..50: mol_type = other DNA
aatgcttgcggcacatcatcaagtccattttatgacgaggaagaagatga

SEQ ID NO: 58453 - DNA, 50 bp, synthetic construct
  source 1..50: mol_type = other DNA
tttgcttacactttattattttttataacaaatcccacaactcaatcaaa

SEQ ID NO: 58454 - DNA, 50 bp, synthetic construct
  source 1..50: mol_type = other DNA
gccccaactacaggattatattttttaaatatgaagtaattagtcgctct

SEQ ID NO: 58455 - DNA, 50 bp, synthetic construct
  source 1..50: mol_type = other DNA
ggtatacttttagtatcactcgggcacccgagggataccatacctatacg

SEQ ID NO: 58456 - DNA, 50 bp, synthetic construct
  source 1..50: mol_type = other DNA
attaattgaatgagtttaacaagtaatattacataattgattatattata

SEQ ID NO: 58457 - DNA, 50 bp, synthetic construct
  source 1..50: mol_type = other DNA
agtgataaaaaaaatccatagccttattttccgcttctttttcctgaact

SEQ ID NO: 58458 - DNA, 50 bp, synthetic construct
  source 1..50: mol_type = other DNA
atgtccgaacgcaaatcgatgcgattaggcaaaatacatccctcgcctaa

SEQ ID NO: 58459 - DNA, 50 bp, synthetic construct
  source 1..50: mol_type = other DNA
cgacacctgcgtggaaaacgccacgctcaggcgactcgcttcaggccacg

SEQ ID NO: 58460 - DNA, 50 bp, synthetic construct
  source 1..50: mol_type = other DNA
gagcaatttctttacgattcttgttacattagctgataattaaattgcaa

SEQ ID NO: 58461 - DNA, 50 bp, synthetic construct
  source 1..50: mol_type = other DNA
agttgtgaggtcagttcatgattggccaatcacacatccaaaaaactaac

SEQ ID NO: 58462 - DNA, 50 bp, synthetic construct
  source 1..50: mol_type = other DNA
atcgctctagttccagcacgaccctagacggcgcttcggactatggcgtc

SEQ ID NO: 58463 - DNA, 50 bp, synthetic construct
  source 1..50: mol_type = other DNA
atcaatgcataaaaaaagaaatatttacaattagtttttaatccatttat

SEQ ID NO: 58464 - DNA, 50 bp, synthetic construct
  source 1..50: mol_type = other DNA
taataatttatcaagatcatgaataagatgttaattatgataaattaaat

SEQ ID NO: 58465 - DNA, 50 bp, synthetic construct
  source 1..50: mol_type = other DNA
ttctaaatttatcttcctttaggtagataagtgggaaaataaaaaaagag

SEQ ID NO: 58466 - DNA, 50 bp, synthetic construct
  source 1..50: mol_type = other DNA
aaaatttacaaaacaagtaatatttaaatatatattgagtttaaaaattt

SEQ ID NO: 58467 - DNA, 50 bp, synthetic construct
  source 1..50: mol_type = other DNA
ggcaattattatcccatagaatattttttttgttgtggataaatcttaaa

SEQ ID NO: 58468 - DNA, 50 bp, synthetic construct
  source 1..50: mol_type = other DNA
aaatgtagctaagttaataaaaaaatttttttattcttttgataggaata

SEQ ID NO: 58469 - DNA, 50 bp, synthetic construct
  source 1..50: mol_type = other DNA
taatttagaacctattactggtataagataaatttagaatatctaaatta

SEQ ID NO: 58470 - DNA, 50 bp, synthetic construct
  source 1..50: mol_type = other DNA
tttatttaacctctgtatcagttttaaaactgatatagacttttaatttt

SEQ ID NO: 58471 - DNA, 50 bp, synthetic construct
  source 1..50: mol_type = other DNA
ttgaggccctttcaaacgcgctgccgccagaacgggtgagacggccgcaa

SEQ ID NO: 58472 - DNA, 50 bp, synthetic construct
  source 1..50: mol_type = other DNA
gctcacggaaaggatgtgaaaatcatgctttgtccagcatttccgttacc

SEQ ID NO: 58473 - DNA, 50 bp, synthetic construct
  source 1..50: mol_type = other DNA
ttcacaaagatactgcaggtcacgcggaatacctgtacagcctgattgaa

SEQ ID NO: 58474 - DNA, 50 bp, synthetic construct
  source 1..50: mol_type = other DNA
tgttggagcttctgatattacggatatatgtaatgacagaaagtgaggtg

SEQ ID NO: 58475 - DNA, 50 bp, synthetic construct
  source 1..50: mol_type = other DNA
cctcagagggcaatcgctgaattgtacaatgccgaaaatcacgaaaatcg

SEQ ID NO: 58476 - DNA, 50 bp, synthetic construct
  source 1..50: mol_type = other DNA
cggtcgggctgttttgctgtctgtaaaaaaacagcaaaacgatacgcaag

SEQ ID NO: 58477 - DNA, 50 bp, synthetic construct
  source 1..50: mol_type = other DNA
tgatataaatgagccacacacccattattagttgcattgcttttatatca

SEQ ID NO: 58478 - DNA, 50 bp, synthetic construct
  source 1..50: mol_type = other DNA
tctttttcagcagctcaatggctaaaagtacaatgacccctttaaacagg

SEQ ID NO: 58479 - DNA, 50 bp, synthetic construct
  source 1..50: mol_type = other DNA
tctgaacgcccagtatatcaaggaattgactgaatttcttaaatttcatt

SEQ ID NO: 58480 - DNA, 50 bp, synthetic construct
  source 1..50: mol_type = other DNA
ttatctggcattgaagcatgaaacttaaatttcatttgtcattcctccta

SEQ ID NO: 58481 - DNA, 50 bp, synthetic construct
  source 1..50: mol_type = other DNA
ggcttgtaaaccaagatcttcaatcataatcgcttccttttcattaacta

SEQ ID NO: 58482 - DNA, 50 bp, synthetic construct
  source 1..50: mol_type = other DNA
ttcctccttaagctcaagaaaactttattttttatacacttttttaggag

SEQ ID NO: 58483 - DNA, 50 bp, synthetic construct
  source 1..50: mol_type = other DNA
aagaacttcttgtcttatcggatggtaatccgtggcatcaggcagtcacc

SEQ ID NO: 58484 - DNA, 50 bp, synthetic construct
  source 1..50: mol_type = other DNA
gcttaatgatttttatagtacgaatatgtgacctaccaaaaaggaggtga

SEQ ID NO: 58485 - DNA, 50 bp, synthetic construct
  source 1..50: mol_type = other DNA
ctaatcgtacatatactcgtaagaagcaggcggaatatgcctacaatttg

SEQ ID NO: 58486 - DNA, 50 bp, synthetic construct
  source 1..50: mol_type = other DNA
ggttgtcattgtgtgctcctttctggagacagcggcatccaggagcttct

SEQ ID NO: 58487 - DNA, 50 bp, synthetic construct
  source 1..50: mol_type = other DNA
gcgcgggcgcggcgcgtagcctcggcccagcccagcgcccgtccccgcgt

SEQ ID NO: 58488 - DNA, 50 bp, synthetic construct
  source 1..50: mol_type = other DNA
gcgcgttttcttcagcgagcggagatcgccgcaccctggagaagaaatcc

SEQ ID NO: 58489 - DNA, 50 bp, synthetic construct
  source 1..50: mol_type = other DNA
cagtacgacctcgggctcagcaagatcgtggccgtcgcggatgtgtacag

SEQ ID NO: 58490 - DNA, 50 bp, synthetic construct
  source 1..50: mol_type = other DNA
atccgaaagaaaacaattttggcgatgaccaaacttacttcctttttata

SEQ ID NO: 58491 - DNA, 50 bp, synthetic construct
  source 1..50: mol_type = other DNA
gtcagtgatatgtgatcttattttataaagataatgcacattatagcatc

SEQ ID NO: 58492 - DNA, 50 bp, synthetic construct
  source 1..50: mol_type = other DNA
atataatgcagctcgtttcatttttaaaggatcattgaatcaaagtgtgg

SEQ ID NO: 58493 - DNA, 50 bp, synthetic construct
  source 1..50: mol_type = other DNA
gccaagctcgcccgcgccaagctcacgagcaggtcgcgggcaacgtgatc

SEQ ID NO: 58494 - DNA, 50 bp, synthetic construct
  source 1..50: mol_type = other DNA
gtgcgcagtggtggccgacccggacctcggggtctcccaacactccgttc

SEQ ID NO: 58495 - DNA, 50 bp, synthetic construct
  source 1..50: mol_type = other DNA
atccggccggcctcggccgtcggtgcaatcgcgacaaaggtcggccggaa

SEQ ID NO: 58496 - DNA, 50 bp, synthetic construct
  source 1..50: mol_type = other DNA
ggacctctagcccctcccgctcggcccccggcggtagatgccaggggcgc

SEQ ID NO: 58497 - DNA, 50 bp, synthetic construct
  source 1..50: mol_type = other DNA
gacccgcagcatggggcgcaggctggccaccgcgggacatggcgcggcgc

SEQ ID NO: 58498 - DNA, 50 bp, synthetic construct
  source 1..50: mol_type = other DNA
tcggtgcgcaggccgccgccgagggccgtctagcgcgttgcctgcacgag

SEQ ID NO: 58499 - DNA, 50 bp, synthetic construct
  source 1..50: mol_type = other DNA
gtctgggacggcgcgagcggcatcggggtgtcgaacgtgccaccaaagac

SEQ ID NO: 58500 - DNA, 50 bp, synthetic construct
  source 1..50: mol_type = other DNA
tacgacatgggcatcatccgcgaccggtgcttgaggctgccggtggggtg

SEQ ID NO: 58501 - DNA, 50 bp, synthetic construct
  source 1..50: mol_type = other DNA
tgcgccggacctacccgggcgttgatccacgggctgacgagcgcgatgct

SEQ ID NO: 58502 - DNA, 50 bp, synthetic construct
  source 1..50: mol_type = other DNA
cttcgagcacatgcccgtcgttgacgtcaccggcgcgctgtgcacggtca

SEQ ID NO: 58503 - DNA, 50 bp, synthetic construct
  source 1..50: mol_type = other DNA
ggatggcggacagggtggctggagcgcccttgccggccgcgaggccgtcg

SEQ ID NO: 58504 - DNA, 50 bp, synthetic construct
  source 1..50: mol_type = other DNA
ccggttacgcagaagcccccgcctcgaactggccgccgaaggcaaaccgg

SEQ ID NO: 58505 - DNA, 50 bp, synthetic construct
  source 1..50: mol_type = other DNA
ttaatcctcgctacaagtcccatcttaatctcttcataacccatcataaa

SEQ ID NO: 58506 - DNA, 50 bp, synthetic construct
  source 1..50: mol_type = other DNA
tatcccaagttgtgactctggtgatattatccccagccacactaagactg

SEQ ID NO: 58507 - DNA, 50 bp, synthetic construct
  source 1..50: mol_type = other DNA
cagttaatgctcttaatctaagcgttagctgagataatgccctgaaaccg

SEQ ID NO: 58508 - DNA, 50 bp, synthetic construct
  source 1..50: mol_type = other DNA
acgagttggtagataaaattataaaaatatgacgatccatataagcaggc

SEQ ID NO: 58509 - DNA, 50 bp, synthetic construct
  source 1..50: mol_type = other DNA
taatcttgtagggcagcaagtggctattgcactgcttcccgtttcaatgg

SEQ ID NO: 58510 - DNA, 50 bp, synthetic construct
  source 1..50: mol_type = other DNA
agaaagtcattaccattgaacctgctcacaaaaaatagtaaactctctga

SEQ ID NO: 58511 - DNA, 50 bp, synthetic construct
  source 1..50: mol_type = other DNA
tcagctatttataaaataggcaatttgtagccttgtgagaaaaaagctga

SEQ ID NO: 58512 - DNA, 50 bp, synthetic construct
  source 1..50: mol_type = other DNA
ttaccggattttcaggcggttgtcacgtcagcattcagaaagaacggtag

SEQ ID NO: 58513 - DNA, 50 bp, synthetic construct
  source 1..50: mol_type = other DNA
gtgagcgcgagtcccgagtctcggccggaggactcgtcctttaccgtcac

SEQ ID NO: 58514 - DNA, 50 bp, synthetic construct
  source 1..50: mol_type = other DNA
ccggcggaggccggcctcgtcagcgcgtcgacccggccgaggtcgcgacc

SEQ ID NO: 58515 - DNA, 50 bp, synthetic construct
  source 1..50: mol_type = other DNA
gtggtgcgggcgcagtgggatcacgtgggaagattctgcgcacataccac

SEQ ID NO: 58516 - DNA, 50 bp, synthetic construct
  source 1..50: mol_type = other DNA
gcggaactctacgacggtttcatcgcttcggagccgacgaagaggtaatt

SEQ ID NO: 58517 - DNA, 50 bp, synthetic construct
  source 1..50: mol_type = other DNA
ctccagaattgcgggtgtcgctggtggcttgcgcacccgcaattgcgaat

SEQ ID NO: 58518 - DNA, 50 bp, synthetic construct
  source 1..50: mol_type = other DNA
atcagaattgattgggtcttctgatgccacaagatgaacaatattcatca

SEQ ID NO: 58519 - DNA, 50 bp, synthetic construct
  source 1..50: mol_type = other DNA
cacctcagtcggggaggcggtcgcccacggtaggatcagcgactggggtg

SEQ ID NO: 58520 - DNA, 50 bp, synthetic construct
  source 1..50: mol_type = other DNA
tttgtggagtgtatgacgggaagaattcataccttcaaaagccccagaaa

SEQ ID NO: 58521 - DNA, 50 bp, synthetic construct
  source 1..50: mol_type = other DNA
tttgtcgttcccgatcttggcttcagagaaagcagatcgagaaggtttaa

SEQ ID NO: 58522 - DNA, 50 bp, synthetic construct
  source 1..50: mol_type = other DNA
aggttcgagaaggtattcatcacgagcgcgttgaatacgttctcgggcct

SEQ ID NO: 58523 - DNA, 50 bp, synthetic construct
  source 1..50: mol_type = other DNA
taaagggcatgctcgatgtcttgccgggtcgcccttttaattgcccgtta

SEQ ID NO: 58524 - DNA, 50 bp, synthetic construct
  source 1..50: mol_type = other DNA
cgctaaggccagcatagtagccatccatgttcaggtaagacaacgatgcc

SEQ ID NO: 58525 - DNA, 50 bp, synthetic construct
  source 1..50: mol_type = other DNA
gcgacctggtcttccgagagtacgctcgagacctcccgtttccaggtcgc

SEQ ID NO: 58526 - DNA, 50 bp, synthetic construct
  source 1..50: mol_type = other DNA
ttttcgagtggagggatcgtttttgaaactaagagccgtcattgaccaaa

SEQ ID NO: 58527 - DNA, 50 bp, synthetic construct
  source 1..50: mol_type = other DNA
ctttccttttagcaagatattctttccgcaccaccttttcaaagggtaag

SEQ ID NO: 58528 - DNA, 50 bp, synthetic construct
  source 1..50: mol_type = other DNA
cttaacataaattcctccgtttccgatgccacggagtaattgatgtcctc

SEQ ID NO: 58529 - DNA, 50 bp, synthetic construct
  source 1..50: mol_type = other DNA
gcatcgatctgcagcgcacgaagccggcgtaactcgcggcagcacgatca

SEQ ID NO: 58530 - DNA, 50 bp, synthetic construct
  source 1..50: mol_type = other DNA
ctcgtccagggcgagggccgcggcgaggaccgggcctccggcttgacgac

SEQ ID NO: 58531 - DNA, 50 bp, synthetic construct
  source 1..50: mol_type = other DNA
tgtatgattatcaggcaaaaaaggtaatcgcatttggtgataactataat

SEQ ID NO: 58532 - DNA, 50 bp, synthetic construct
  source 1..50: mol_type = other DNA
ttgttcgtaatctgccaaatggatatgtgcatgtcttaaagaatgaaaat

SEQ ID NO: 58533 - DNA, 50 bp, synthetic construct
  source 1..50: mol_type = other DNA
gtttcctgaaaagaattttattggtattatgaaaaacctttagaggtatg

SEQ ID NO: 58534 - DNA, 50 bp, synthetic construct
  source 1..50: mol_type = other DNA
ggacaaggattgcacgaaccaatcaagaatgcgtcttgcagtctatgcac

SEQ ID NO: 58535 - DNA, 50 bp, synthetic construct
  source 1..50: mol_type = other DNA
gtatcaaatacaccatcataattagtctctttatattgcctattttatca

SEQ ID NO: 58536 - DNA, 50 bp, synthetic construct
  source 1..50: mol_type = other DNA
tcatctcctttttctaaccacaactttatgtagtatcgaaaaatgacaac

SEQ ID NO: 58537 - DNA, 50 bp, synthetic construct
  source 1..50: mol_type = other DNA
aagaagtcaagtgtattttgttaagatggaacaaatacacttagcattga

SEQ ID NO: 58538 - DNA, 50 bp, synthetic construct
  source 1..50: mol_type = other DNA
ttcgcggaaatatgtctataaaaactttttcgccgatgtatgcacagctt

SEQ ID NO: 58539 - DNA, 50 bp, synthetic construct
  source 1..50: mol_type = other DNA
aaacatactttttaaaaggaatgtttattttccttgtcacaaaagccttt

SEQ ID NO: 58540 - DNA, 50 bp, synthetic construct
  source 1..50: mol_type = other DNA
ttcctctttgatacgcaagaatttataagttcactagtgatgatgataaa

SEQ ID NO: 58541 - DNA, 50 bp, synthetic construct
  source 1..50: mol_type = other DNA
tgatgaacacctccctgatgttgtttgcgacatcacccttatgatcatca

SEQ ID NO: 58542 - DNA, 50 bp, synthetic construct
  source 1..50: mol_type = other DNA
ctttttaaaggtatagtcaagtcaataactgcgctaataactctaaaaag

SEQ ID NO: 58543 - DNA, 50 bp, synthetic construct
  source 1..50: mol_type = other DNA
gaagttattaattataaagatttatcttcgatattgatattaatcagttc

SEQ ID NO: 58544 - DNA, 50 bp, synthetic construct
  source 1..50: mol_type = other DNA
gttcaaatccgctttattagatagttctatatcttaaatcaaattcaaaa

SEQ ID NO: 58545 - DNA, 50 bp, synthetic construct
  source 1..50: mol_type = other DNA
ggaatattggggaaaaggaaagtagttttgaatgttttctacaatattat

SEQ ID NO: 58546 - DNA, 50 bp, synthetic construct
  source 1..50: mol_type = other DNA
ccgttactctgcccgaccatcccgcgcgggatggagcagcccggtagctc

SEQ ID NO: 58547 - DNA, 50 bp, synthetic construct
  source 1..50: mol_type = other DNA
aaataacctcgctttctataaggctgatatgtttgaaagcaaggttatcg

SEQ ID NO: 58548 - DNA, 50 bp, synthetic construct
  source 1..50: mol_type = other DNA
tgtatcgaaagaagaagaccaaggtagctgcagcttcttcatcgataact

SEQ ID NO: 58549 - DNA, 50 bp, synthetic construct
  source 1..50: mol_type = other DNA
acggcaactccaggaacaactcgtcgggatgtgaatctgcaggttgccgt

SEQ ID NO: 58550 - DNA, 50 bp, synthetic construct
  source 1..50: mol_type = other DNA
acggatgaatggaattctgaagcaagtggaacgggttcctcttcttcggt

SEQ ID NO: 58551 - DNA, 50 bp, synthetic construct
  source 1..50: mol_type = other DNA
attacaatttacaaaagtttttaaaattaagcaattatcaaaaatgatag

SEQ ID NO: 58552 - DNA, 50 bp, synthetic construct
  source 1..50: mol_type = other DNA
aaatactacaaaaaagaatagtaaagttaatatcataaggtgtagtgtat

SEQ ID NO: 58553 - DNA, 50 bp, synthetic construct
  source 1..50: mol_type = other DNA
gttggtcatgtttggttaattgctattgctaccgcaatacatcgaccaac

SEQ ID NO: 58554 - DNA, 50 bp, synthetic construct
  source 1..50: mol_type = other DNA
atatcgtgatttcaatcttatcaagaactagtgctagataatctcgacaa

SEQ ID NO: 58555 - DNA, 50 bp, synthetic construct
  source 1..50: mol_type = other DNA
gctatgtatagctatatccatattttgatttcatccatgaaatatctcaa

SEQ ID NO: 58556 - DNA, 50 bp, synthetic construct
  source 1..50: mol_type = other DNA
ccagttcgcatcctgttgaaaataatttctgtcaacaggaaagcaatctg

SEQ ID NO: 58557 - DNA, 50 bp, synthetic construct
  source 1..50: mol_type = other DNA
ttaaatttatgaaatttaataaggatgctttaaccaacatatgcgaatag

SEQ ID NO: 58558 - DNA, 50 bp, synthetic construct
  source 1..50: mol_type = other DNA
tttttctccattatgcattcgaccaaattcgacgataacatttgaagaaa

SEQ ID NO: 58559 - DNA, 50 bp, synthetic construct
  source 1..50: mol_type = other DNA
aatataagtatgctcaggatataacagtctactatgagcatttatgcgag

SEQ ID NO: 58560 - DNA, 50 bp, synthetic construct
  source 1..50: mol_type = other DNA
taaccatgacacaatcatgattaagatatatcacgggcggcggttggtta

SEQ ID NO: 58561 - DNA, 50 bp, synthetic construct
  source 1..50: mol_type = other DNA
aaatggcgcccggattttgtatccgctgatctgctatcctgtctgcaaga

SEQ ID NO: 58562 - DNA, 50 bp, synthetic construct
  source 1..50: mol_type = other DNA
atgtccgagaaaaagcctctctttttaaaatatactgttttatctgtcac

SEQ ID NO: 58563 - DNA, 50 bp, synthetic construct
  source 1..50: mol_type = other DNA
atgtgcagattcaatatcatcaacgaggtgatgatagtgaccaaaagaaa

SEQ ID NO: 58564 - DNA, 50 bp, synthetic construct
  source 1..50: mol_type = other DNA
cgatccatagttaatgtatatgcgttctaattgatattaacgatgtatct

SEQ ID NO: 58565 - DNA, 50 bp, synthetic construct
  source 1..50: mol_type = other DNA
acgaaaagcacatatgatttatcagcttataataactattaaaaggagga

SEQ ID NO: 58566 - DNA, 50 bp, synthetic construct
  source 1..50: mol_type = other DNA
aaaggctctaaatggagcttttgatttcacttctgtagatgcaattattt

SEQ ID NO: 58567 - DNA, 50 bp, synthetic construct
  source 1..50: mol_type = other DNA
tcactgttttttctttttttacgaatttgactaaaatacaaaaatagcgc

SEQ ID NO: 58568 - DNA, 50 bp, synthetic construct
  source 1..50: mol_type = other DNA
ggcgacctccaccacgcagtcggccaaccgacatcgtgagggtggtcaaa

SEQ ID NO: 58569 - DNA, 50 bp, synthetic construct
  source 1..50: mol_type = other DNA
atgattcataaaccctcttcctttttgttagatgagtgttattgaatgac

SEQ ID NO: 58570 - DNA, 50 bp, synthetic construct
  source 1..50: mol_type = other DNA
ccacagtgataatatatatttatgaataactatggccattattcagatga

SEQ ID NO: 58571 - DNA, 50 bp, synthetic construct
  source 1..50: mol_type = other DNA
tagtttgattgattatgtttaaaggttgttgtttataagcaatatcatgg

SEQ ID NO: 58572 - DNA, 50 bp, synthetic construct
  source 1..50: mol_type = other DNA
gataatatatatttatgaatgaatttatttatttataaataataatggga

SEQ ID NO: 58573 - DNA, 50 bp, synthetic construct
  source 1..50: mol_type = other DNA
tatattatctaaatgatgtatcacatgtgatacatcattttgataatata

SEQ ID NO: 58574 - DNA, 50 bp, synthetic construct
  source 1..50: mol_type = other DNA
ggcacgctgttcaacctgcccgtgaccacgcacgggttgaccatcttgcc

SEQ ID NO: 58575 - DNA, 50 bp, synthetic construct
  source 1..50: mol_type = other DNA
aaagcttgattttatcaggttttttagtcatgtctatttcatcctttccc

SEQ ID NO: 58576 - DNA, 50 bp, synthetic construct
  source 1..50: mol_type = other DNA
cgtaaagcattacccgacttaagcacgcttaaccaatataaagcgggttc

SEQ ID NO: 58577 - DNA, 50 bp, synthetic construct
  source 1..50: mol_type = other DNA
cgccgcgtggcagcctatgcccgcgtctcaaacaggtcttccaccttgca

SEQ ID NO: 58578 - DNA, 50 bp, synthetic construct
  source 1..50: mol_type = other DNA
caaaataagaaataagcttgcggcaattacaaagctcatctcttttttct

SEQ ID NO: 58579 - DNA, 50 bp, synthetic construct
  source 1..50: mol_type = other DNA
atcttcaaatacacaaaacccttataatcgggtgatttttattagacacg

SEQ ID NO: 58580 - DNA, 50 bp, synthetic construct
  source 1..50: mol_type = other DNA
acctacttatccacgttaattggtttaccaattccagtcaataagaagaa

SEQ ID NO: 58581 - DNA, 50 bp, synthetic construct
  source 1..50: mol_type = other DNA
taccagcgaaagagtatgagtgtgtgctctaccattctctatcctatagc

SEQ ID NO: 58582 - DNA, 50 bp, synthetic construct
  source 1..50: mol_type = other DNA
ccaagagacctctgccaaataagcataccaccccggcttaggtgccttat

SEQ ID NO: 58583 - DNA, 50 bp, synthetic construct
  source 1..50: mol_type = other DNA
tattctgccgtctgtaaatcaagtttcgccgcgttggacacggcagatac

SEQ ID NO: 58584 - DNA, 50 bp, synthetic construct
  source 1..50: mol_type = other DNA
tgttacctctgtgtgccgctaatagctttgtgcagcaccatgcaatatat

SEQ ID NO: 58585 - DNA, 50 bp, synthetic construct
  source 1..50: mol_type = other DNA
taaaattttgtataaagtatgtttttcaattgctcctttacaccgtttta

SEQ ID NO: 58586 - DNA, 50 bp, synthetic construct
  source 1..50: mol_type = other DNA
ctgtttgcattttacttcttatcacctgataataaataaaacctttttcc

SEQ ID NO: 58587 - DNA, 50 bp, synthetic construct
  source 1..50: mol_type = other DNA
actacctgtaccagcattattaagcacttaaccaatataaagcgggtaag

SEQ ID NO: 58588 - DNA, 50 bp, synthetic construct
  source 1..50: mol_type = other DNA
ctacctgtaccagcattactaagcacgcttaaccagtacaaagcaggtaa

SEQ ID NO: 58589 - DNA, 50 bp, synthetic construct
  source 1..50: mol_type = other DNA
tggcccttactgcgctggcgcgccgcggcaaagcagggcatggagttaga

SEQ ID NO: 58590 - DNA, 50 bp, synthetic construct
  source 1..50: mol_type = other DNA
ggtaactcattcccttccttatccgtatcaaatcctccggattcgtacaa

SEQ ID NO: 58591 - DNA, 50 bp, synthetic construct
  source 1..50: mol_type = other DNA
actctaatttattttaaaaaggtgaaacaacttcgaaaatacattaatat

SEQ ID NO: 58592 - DNA, 50 bp, synthetic construct
  source 1..50: mol_type = other DNA
tctttctatgcagttctattataccatataaaaagagctgcgaaataaat

SEQ ID NO: 58593 - DNA, 50 bp, synthetic construct
  source 1..50: mol_type = other DNA
tcctttccctaaacaggactatctcatatatatgccttttagtcaatgga

SEQ ID NO: 58594 - DNA, 50 bp, synthetic construct
  source 1..50: mol_type = other DNA
gttttcaattcctccgtaacaaagaatttgaataaatagttattgaaagt

SEQ ID NO: 58595 - DNA, 50 bp, synthetic construct
  source 1..50: mol_type = other DNA
aaaacgtatttttcaggagtatgcatttaatgtcctgaaaaaatatctgg

SEQ ID NO: 58596 - DNA, 50 bp, synthetic construct
  source 1..50: mol_type = other DNA
cttctgtcagttacgcagagcacaattaagccctgaagcgcagaaagaat

SEQ ID NO: 58597 - DNA, 50 bp, synthetic construct
  source 1..50: mol_type = other DNA
gaattaattaagctaaaacctaattaagggttttattgcttacaattcac

SEQ ID NO: 58598 - DNA, 50 bp, synthetic construct
  source 1..50: mol_type = other DNA
attgttacatccaaactaataaaatatctttttccctctgaagatcatca

SEQ ID NO: 58599 - DNA, 50 bp, synthetic construct
  source 1..50: mol_type = other DNA
aggctgataaggtgattgctctatataataagttttcaactcatcttcag

SEQ ID NO: 58600 - DNA, 50 bp, synthetic construct
  source 1..50: mol_type = other DNA
agttattgcctgcacatcctttttacaatcagttagatatgtaaatggct

SEQ ID NO: 58601 - DNA, 50 bp, synthetic construct
  source 1..50: mol_type = other DNA
tatttcttccattatttcactccgaagcagctgaacacttggaagaaatc

SEQ ID NO: 58602 - DNA, 50 bp, synthetic construct
  source 1..50: mol_type = other DNA
gatggatcattccgcttctattttaaaaactcaaagatttatgaaatata

SEQ ID NO: 58603 - DNA, 50 bp, synthetic construct
  source 1..50: mol_type = other DNA
gaagaacagcggccccgaccagtgggcgcaggtcgatgccggtggtggtg

SEQ ID NO: 58604 - DNA, 50 bp, synthetic construct
  source 1..50: mol_type = other DNA
agccattcggattgcccggtgggcaagcccgcggggaaatccaaatgagc

SEQ ID NO: 58605 - DNA, 50 bp, synthetic construct
  source 1..50: mol_type = other DNA
ttttcaaatagagaattgatttttaatgataccatgtatgtatttgtaaa

SEQ ID NO: 58606 - DNA, 50 bp, synthetic construct
  source 1..50: mol_type = other DNA
tttaaaaactaaattcgttatatagttatattgtatatttactttttatc

SEQ ID NO: 58607 - DNA, 50 bp, synthetic construct
  source 1..50: mol_type = other DNA
gcatacgaacacctttcctttcatttgaccaagggcggcttgtagtgatt

SEQ ID NO: 58608 - DNA, 50 bp, synthetic construct
  source 1..50: mol_type = other DNA
tcgaggcaaaggccaaactgccgcttctaaaaatacggcggttgtataaa

SEQ ID NO: 58609 - DNA, 50 bp, synthetic construct
  source 1..50: mol_type = other DNA
ctctgtactttcgataaaacgcatggatgcgccgagctcgccgtccggac

SEQ ID NO: 58610 - DNA, 50 bp, synthetic construct
  source 1..50: mol_type = other DNA
attccatgattagttttgatgttttacgatttcaaaaatacgcatgatac

SEQ ID NO: 58611 - DNA, 50 bp, synthetic construct
  source 1..50: mol_type = other DNA
tctttatcattgtaaagatacaaaatagcgtgcagacgaaattatacaga

SEQ ID NO: 58612 - DNA, 50 bp, synthetic construct
  source 1..50: mol_type = other DNA
gccgaaaacccagaactaaacgtggccattgcaagggcaaggttttcggt

SEQ ID NO: 58613 - DNA, 50 bp, synthetic construct
  source 1..50: mol_type = other DNA
tatccacataatgaaattaaaaatctttttttatactcaaaaataaggag

SEQ ID NO: 58614 - DNA, 50 bp, synthetic construct
  source 1..50: mol_type = other DNA
ttttttagctttaggcttagagatccgcttctaaaatcaaaatgttgtgt

SEQ ID NO: 58615 - DNA, 50 bp, synthetic construct
  source 1..50: mol_type = other DNA
ggaaccgttaccaccccatattccatagccgaagggaagtttccggtttt

SEQ ID NO: 58616 - DNA, 50 bp, synthetic construct
  source 1..50: mol_type = other DNA
ccggtcttgaaacggagccgccggaccctgcatttcccggcaaagggcaa

SEQ ID NO: 58617 - DNA, 50 bp, synthetic construct
  source 1..50: mol_type = other DNA
gcagggctgcgactacttcgcgaccagtttgtttgccgtcggcggccttg

SEQ ID NO: 58618 - DNA, 50 bp, synthetic construct
  source 1..50: mol_type = other DNA
ggcgaatcgtcataaagccgcccctttacttgatgtgatgccccttcaga

SEQ ID NO: 58619 - DNA, 50 bp, synthetic construct
  source 1..50: mol_type = other DNA
aggatatcagaacgagacatcatttgcctgagattagattgtgattttta

SEQ ID NO: 58620 - DNA, 50 bp, synthetic construct
  source 1..50: mol_type = other DNA
atgacattcatcactcttttaaggagtagtaaaagaccaataaattaaag

SEQ ID NO: 58621 - DNA, 50 bp, synthetic construct
  source 1..50: mol_type = other DNA
gaaaaaacggaacatctctttcggataaaaaagatatgttccgcataaac

SEQ ID NO: 58622 - DNA, 50 bp, synthetic construct
  source 1..50: mol_type = other DNA
tcaagagttcaaatcccacctccgaaaccccgattttatcggggtttttt

SEQ ID NO: 58623 - DNA, 50 bp, synthetic construct
  source 1..50: mol_type = other DNA
attattgatgtttagtggaattttaaataattaatttaaaagattattac

SEQ ID NO: 58624 - DNA, 50 bp, synthetic construct
  source 1..50: mol_type = other DNA
tgcatcttcgaatttgctcattttaaaaaatttaaacaaaaaaagatgca

SEQ ID NO: 58625 - DNA, 50 bp, synthetic construct
  source 1..50: mol_type = other DNA
cgccgcccaaaccacctgcttgtcgtaggaagcaatcatattggccatga

SEQ ID NO: 58626 - DNA, 50 bp, synthetic construct
  source 1..50: mol_type = other DNA
atggaaatggttctctatcattccgaacgatgataaggatccattatacg

SEQ ID NO: 58627 - DNA, 50 bp, synthetic construct
  source 1..50: mol_type = other DNA
tactgacaacatcatggtacagacgaatcggtacatagatgttatcagta

SEQ ID NO: 58628 - DNA, 50 bp, synthetic construct
  source 1..50: mol_type = other DNA
aacatcacccagaacatagagcgtatttagagtataataaggatgaggtt

SEQ ID NO: 58629 - DNA, 50 bp, synthetic construct
  source 1..50: mol_type = other DNA
tgatacgaattctccgccggaggcttgcctctggaatgaagttgacgaat

SEQ ID NO: 58630 - DNA, 50 bp, synthetic construct
  source 1..50: mol_type = other DNA
caattgcttcttgaaatacctgggtaaaggcgtggttccgtaagaaaaca

SEQ ID NO: 58631 - DNA, 50 bp, synthetic construct
  source 1..50: mol_type = other DNA
ttccaaacaatattaaagatggataaaaagataattaatatatgataaag

SEQ ID NO: 58632 - DNA, 50 bp, synthetic construct
  source 1..50: mol_type = other DNA
tcgtgaccgaaatattacagttgtcgcgaacaccattttaccggtcaggg

SEQ ID NO: 58633 - DNA, 50 bp, synthetic construct
  source 1..50: mol_type = other DNA
cggaaaatcaattcgttttcctgcgcggatagaaatatatttgcagggtg

SEQ ID NO: 58634 - DNA, 50 bp, synthetic construct
  source 1..50: mol_type = other DNA
aaatcacgctcctttccgctaccataaaacggcgcttcctattcgagaag

SEQ ID NO: 58635 - DNA, 50 bp, synthetic construct
  source 1..50: mol_type = other DNA
aatggagaagaataaagaaaaatacgtatttttcaaaggattcagaaatt

SEQ ID NO: 58636 - DNA, 50 bp, synthetic construct
  source 1..50: mol_type = other DNA
ttttcttgcgctatcaataggtatcaatagatattgaaacttattcggat

SEQ ID NO: 58637 - DNA, 50 bp, synthetic construct
  source 1..50: mol_type = other DNA
gccctgctcgatctccacttcggccttccttgttggagatcggatgacgc

SEQ ID NO: 58638 - DNA, 50 bp, synthetic construct
  source 1..50: mol_type = other DNA
ggtactaagacaggcaggacagccgccgtggtccagcctgtgacctgctg

SEQ ID NO: 58639 - DNA, 50 bp, synthetic construct
  source 1..50: mol_type = other DNA
aatctggcatattttatccacaaagtaacattactaaaagttgcacattg

SEQ ID NO: 58640 - DNA, 50 bp, synthetic construct
  source 1..50: mol_type = other DNA
ccgaacgacggaccttctgcaaaatgttttccatgatgtcctccttcttt

SEQ ID NO: 58641 - DNA, 50 bp, synthetic construct
  source 1..50: mol_type = other DNA
caatgtgcaacttttagtaatgctactttgtggataaaatatgccagatt

SEQ ID NO: 58642 - DNA, 50 bp, synthetic construct
  source 1..50: mol_type = other DNA
gcactacattttccataacatacacctcatcgggattgaaagagcagtcc

SEQ ID NO: 58643 - DNA, 50 bp, synthetic construct
  source 1..50: mol_type = other DNA
cataaatgttttcttacgtcaccgcccctgacagcaccttgacaaatatg

SEQ ID NO: 58644 - DNA, 50 bp, synthetic construct
  source 1..50: mol_type = other DNA
tataactcgtttctatttagaagatttacaagaaataaaaaggcccatta

SEQ ID NO: 58645 - DNA, 50 bp, synthetic construct
  source 1..50: mol_type = other DNA
aaaacaatgctaaataaaacattaaataatatattaaagtgattcatagt

SEQ ID NO: 58646 - DNA, 50 bp, synthetic construct
  source 1..50: mol_type = other DNA
ggaacatacaccttacggataccggagcatatccggcagctcgatgttct

SEQ ID NO: 58647 - DNA, 50 bp, synthetic construct
  source 1..50: mol_type = other DNA
aagcacctcgtaagcctgccggttcttaccggcaggcggagtatctgtac

SEQ ID NO: 58648 - DNA, 50 bp, synthetic construct
  source 1..50: mol_type = other DNA
aagtcgcatttgatgttgtaaatgatccttttgaacaggcggcttatgcc

SEQ ID NO: 58649 - DNA, 50 bp, synthetic construct
  source 1..50: mol_type = other DNA
agcaattcggattattgtctgcggtaatcaacactatggtaggaacacaa

SEQ ID NO: 58650 - DNA, 50 bp, synthetic construct
  source 1..50: mol_type = other DNA
agttgatttttatcatttgccttctagaaggaggatttttaacggtgaaa

SEQ ID NO: 58651 - DNA, 50 bp, synthetic construct
  source 1..50: mol_type = other DNA
actaaagggaaaagacctcattaccaataattttctctttttctgtttac

SEQ ID NO: 58652 - DNA, 50 bp, synthetic construct
  source 1..50: mol_type = other DNA
gaagcctttgcatgcgcgtttctaacacgaaaaagacatgcgttcgccac

SEQ ID NO: 58653 - DNA, 50 bp, synthetic construct
  source 1..50: mol_type = other DNA
ttagcctctcatggagtcgaagggcgcgcttcgactcttcgagaaacgcc

SEQ ID NO: 58654 - DNA, 50 bp, synthetic construct
  source 1..50: mol_type = other DNA
cgcgctggtcgcgctgggagccgtccccgaccggcagcgcgacgacatca

SEQ ID NO: 58655 - DNA, 50 bp, synthetic construct
  source 1..50: mol_type = other DNA
tgaactatcagccgggctacatcgatcgaccgtgccgagcgcggcattgt

SEQ ID NO: 58656 - DNA, 50 bp, synthetic construct
  source 1..50: mol_type = other DNA
agcaattgaatattaccataaccaattgattgccttttcattttctcgct

SEQ ID NO: 58657 - DNA, 50 bp, synthetic construct
  source 1..50: mol_type = other DNA
aaaaacaggccgccacggtacgggagtaggtgcggcggcgatcacgggca

SEQ ID NO: 58658 - DNA, 50 bp, synthetic construct
  source 1..50: mol_type = other DNA
gtggatgtggagaggtagcgaaaagatgcactatacctcttcccggatcg

SEQ ID NO: 58659 - DNA, 50 bp, synthetic construct
  source 1..50: mol_type = other DNA
cctcctgtccagatacggttccgatatgtgccgcatatcatttaaggaca

SEQ ID NO: 58660 - DNA, 50 bp, synthetic construct
  source 1..50: mol_type = other DNA
aaggctgaaaatataaggattcttttctctttcaaattgatggccatgta

SEQ ID NO: 58661 - DNA, 50 bp, synthetic construct
  source 1..50: mol_type = other DNA
gtgggcttgtattttttcagttttcggaatgtgtctcatggttccaccag

SEQ ID NO: 58662 - DNA, 50 bp, synthetic construct
  source 1..50: mol_type = other DNA
tactgccatgcaggtggacggctacagctaaggaggcaatcatgagagta

SEQ ID NO: 58663 - DNA, 50 bp, synthetic construct
  source 1..50: mol_type = other DNA
tcttttcattgcttccggagaacggccggagacggcagaatatgaggagg

SEQ ID NO: 58664 - DNA, 50 bp, synthetic construct
  source 1..50: mol_type = other DNA
tggaccagcctggcgttctcgtcagatctccagcaccagctgctcctcct

SEQ ID NO: 58665 - DNA, 50 bp, synthetic construct
  source 1..50: mol_type = other DNA
gcctcctcaaaatattctgttgattccaaaacaaaatattgcgcctgtgc

SEQ ID NO: 58666 - DNA, 50 bp, synthetic construct
  source 1..50: mol_type = other DNA
gctgtctcctggtcaatcttcccggtctttttgtgcctccaggctgtagc

SEQ ID NO: 58667 - DNA, 50 bp, synthetic construct
  source 1..50: mol_type = other DNA
aaaataatagcttgtatacggttaaccagctttaaacagaaaattattac

SEQ ID NO: 58668 - DNA, 50 bp, synthetic construct
  source 1..50: mol_type = other DNA
cccgacgcaccatgctgggagccttgcagctacccccatagtgagcaccc

SEQ ID NO: 58669 - DNA, 50 bp, synthetic construct
  source 1..50: mol_type = other DNA
gggcaaaaagaatggtgacggggagggtatcgccgtaatcgttttagcca

SEQ ID NO: 58670 - DNA, 50 bp, synthetic construct
  source 1..50: mol_type = other DNA
ccagcacgcaaaccgtaggaaccaaagcggcacgaccgtacaggtgagcc

SEQ ID NO: 58671 - DNA, 50 bp, synthetic construct
  source 1..50: mol_type = other DNA
gcagcgcgatcagcatggtttatttaaatacactacctaaagcgatacaa

SEQ ID NO: 58672 - DNA, 50 bp, synthetic construct
  source 1..50: mol_type = other DNA
ggtggagatgtcttctactttgggcggtcaacaaggacgaatgggccacc

SEQ ID NO: 58673 - DNA, 50 bp, synthetic construct
  source 1..50: mol_type = other DNA
ctggtcttgtgtaatttcataaaaaattttcagaataagaaaaacgccgc

SEQ ID NO: 58674 - DNA, 50 bp, synthetic construct
  source 1..50: mol_type = other DNA
agacccgccgatggtatcaagcgttatctggtgagacaacggacgggacg

SEQ ID NO: 58675 - DNA, 50 bp, synthetic construct
  source 1..50: mol_type = other DNA
ttataatgacctcctgcatctgtttgtactatgacgaaataccattattc

SEQ ID NO: 58676 - DNA, 50 bp, synthetic construct
  source 1..50: mol_type = other DNA
atagcagcaattaaaggtttacctaaagattttaatttaatttctggtag

SEQ ID NO: 58677 - DNA, 50 bp, synthetic construct
  source 1..50: mol_type = other DNA
agggtatttgtttttttagatagatttcaagctaaaaaatggaatagttc

SEQ ID NO: 58678 - DNA, 50 bp, synthetic construct
  source 1..50: mol_type = other DNA
ttcattttcttcagtatttatcaaatttgataagattataataaacattt

SEQ ID NO: 58679 - DNA, 50 bp, synthetic construct
  source 1..50: mol_type = other DNA
aggttgtcaatgagatcaatcaatcgcgtgattggtcacgttaacaaact

SEQ ID NO: 58680 - DNA, 50 bp, synthetic construct
  source 1..50: mol_type = other DNA
ccgccgacgcgacgaccaggtaggcggcgatctgcaggaagatcggccgg

SEQ ID NO: 58681 - DNA, 50 bp, synthetic construct
  source 1..50: mol_type = other DNA
cgccggccacggcatcgcccataccgagcagctgcttgccgaggccgcta

SEQ ID NO: 58682 - DNA, 50 bp, synthetic construct
  source 1..50: mol_type = other DNA
cgtcaagccttgcctgccgaacagcgatattctcgcggaaacgcttcacg

SEQ ID NO: 58683 - DNA, 50 bp, synthetic construct
  source 1..50: mol_type = other DNA
cgcagcgtacccatcgatttccgggccagatgatcgtgacaaacactacc

SEQ ID NO: 58684 - DNA, 50 bp, synthetic construct
  source 1..50: mol_type = other DNA
atagcagccttttttgtcataataaatatcaacacaaaaaaagccgcagt

SEQ ID NO: 58685 - DNA, 50 bp, synthetic construct
  source 1..50: mol_type = other DNA
atggcacaaatatatgcattactttataatataaccaatattaactatat

SEQ ID NO: 58686 - DNA, 50 bp, synthetic construct
  source 1..50: mol_type = other DNA
agccgtgcctgccggcgagcgagggccgagacccgcaggctggccgaaga

SEQ ID NO: 58687 - DNA, 50 bp, synthetic construct
  source 1..50: mol_type = other DNA
ggtcatggatgacgtccccaaagtttccgcgctggccgttaccgttgatc

SEQ ID NO: 58688 - DNA, 50 bp, synthetic construct
  source 1..50: mol_type = other DNA
gcttacctcgctttcaatgaggctgtagccaacagggaaaaagagtagat

SEQ ID NO: 58689 - DNA, 50 bp, synthetic construct
  source 1..50: mol_type = other DNA
tgcctgtgcaaggtctccggcaccgcacagccgttttcaatgctgtagcc

SEQ ID NO: 58690 - DNA, 50 bp, synthetic construct
  source 1..50: mol_type = other DNA
tatggatgtgaaatttattaataattaaagaaataaattttcaatttgaa

SEQ ID NO: 58691 - DNA, 50 bp, synthetic construct
  source 1..50: mol_type = other DNA
tactaaatctttatccattattattacatgctatgtcaatagttttatat

SEQ ID NO: 58692 - DNA, 50 bp, synthetic construct
  source 1..50: mol_type = other DNA
gcatctatcccagtaacaagaaaaataaaagatgaaaataatatagataa

SEQ ID NO: 58693 - DNA, 50 bp, synthetic construct
  source 1..50: mol_type = other DNA
cattatgttttatatactttagaatttttacaagtatataatttttcatt

SEQ ID NO: 58694 - DNA, 50 bp, synthetic construct
  source 1..50: mol_type = other DNA
agagaagtatattaaatagttatcaatataactatttttaatatactacc

SEQ ID NO: 58695 - DNA, 50 bp, synthetic construct
  source 1..50: mol_type = other DNA
tggattcgtaatacactattttattcgtataatctaatatacatttttca

SEQ ID NO: 58696 - DNA, 50 bp, synthetic construct
  source 1..50: mol_type = other DNA
acaataaagcaagaaatccgttagatcataatatatttttgctttatcaa

SEQ ID NO: 58697 - DNA, 50 bp, synthetic construct
  source 1..50: mol_type = other DNA
catgttcttcgactgctcgatgtagcgctttcgggcacccgagggatacc

SEQ ID NO: 58698 - DNA, 50 bp, synthetic construct
  source 1..50: mol_type = other DNA
gatcgattgccttgcgcacttcgtcgacgagcgccttcgggcacccgagg

SEQ ID NO: 58699 - DNA, 50 bp, synthetic construct
  source 1..50: mol_type = other DNA
ttacgccttttttcgtatattaggtacctaatatacgaaaatatgcaaaa

SEQ ID NO: 58700 - DNA, 50 bp, synthetic construct
  source 1..50: mol_type = other DNA
ttatgcgccatgcggccagttaagcgcctacttggcccaggggtctggtt

SEQ ID NO: 58701 - DNA, 50 bp, synthetic construct
  source 1..50: mol_type = other DNA
cagggcgttgttcagggcggggaccgtacgtcgcgttgaccaccgggaag

SEQ ID NO: 58702 - DNA, 50 bp, synthetic construct
  source 1..50: mol_type = other DNA
ttaaagaaagaaattaaaacagaaattatcatatttatttcttcacaatg

SEQ ID NO: 58703 - DNA, 50 bp, synthetic construct
  source 1..50: mol_type = other DNA
aaaacgggtagaacaaataatcaaagccgagattatgttctaaaaagctt

SEQ ID NO: 58704 - DNA, 50 bp, synthetic construct
  source 1..50: mol_type = other DNA
aattatcatctttgccttttatagaaatgaaaaaggcagataataagatg

SEQ ID NO: 58705 - DNA, 50 bp, synthetic construct
  source 1..50: mol_type = other DNA
aaatgccattttaatctatttatgagcaaaaggagattagactgtgatga

SEQ ID NO: 58706 - DNA, 50 bp, synthetic construct
  source 1..50: mol_type = other DNA
ccatttcatgatgtaaatccgaaagcattgtaatggcaatcaagaaagcc

SEQ ID NO: 58707 - DNA, 50 bp, synthetic construct
  source 1..50: mol_type = other DNA
tgataagtatgaaaaaaatttttaatataggtggttgttcattatactgg

SEQ ID NO: 58708 - DNA, 50 bp, synthetic construct
  source 1..50: mol_type = other DNA
aaaggttggtgaaatgatgagccatatgtaagggcatatcacccgaccaa

SEQ ID NO: 58709 - DNA, 50 bp, synthetic construct
  source 1..50: mol_type = other DNA
gtataaacaaatatatagataaataaagatattcggacaggacactatat

SEQ ID NO: 58710 - DNA, 50 bp, synthetic construct
  source 1..50: mol_type = other DNA
attcatataaaaaagacgggaaaaagttttcgctgatcttccgccgttac

SEQ ID NO: 58711 - DNA, 50 bp, synthetic construct
  source 1..50: mol_type = other DNA
tcctgtgtgctaactgatctgaaatatttctgaatagccagcacgagtaa

SEQ ID NO: 58712 - DNA, 50 bp, synthetic construct
  source 1..50: mol_type = other DNA
gctgaggtgtgacgggtactcatgcgcggcctcgaccgtgacggctcccg

SEQ ID NO: 58713 - DNA, 50 bp, synthetic construct
  source 1..50: mol_type = other DNA
gtaaattataaaaattgcataattcgaaagtaacaattgaaaaatatgac

SEQ ID NO: 58714 - DNA, 50 bp, synthetic construct
  source 1..50: mol_type = other DNA
tccgtggccactcgacgtccgggaggcccccatcgtctagtggcctagga

SEQ ID NO: 58715 - DNA, 50 bp, synthetic construct
  source 1..50: mol_type = other DNA
aggaggcaccgaccgctcgagcctcgaggctcgggacctcgatgtatccg

SEQ ID NO: 58716 - DNA, 50 bp, synthetic construct
  source 1..50: mol_type = other DNA
tgcaatcctgcaccacggagaccagctggaactggtggccaaggaaggca

SEQ ID NO: 58717 - DNA, 50 bp, synthetic construct
  source 1..50: mol_type = other DNA
accgccctccgcgtagtgcacgagatcgcggcggctgcgtcactggccgt

SEQ ID NO: 58718 - DNA, 50 bp, synthetic construct
  source 1..50: mol_type = other DNA
gattcccttcgggtcagcctgattatatacaggcactcagcaaggagcaa

SEQ ID NO: 58719 - DNA, 50 bp, synthetic construct
  source 1..50: mol_type = other DNA
catccctgccaggatagccaaaattgattatggctttaaaagcggggatt

SEQ ID NO: 58720 - DNA, 50 bp, synthetic construct
  source 1..50: mol_type = other DNA
cgcgcctcgcctccggtcttcgaggcgcagaaggagctagaggacatacg

SEQ ID NO: 58721 - DNA, 50 bp, synthetic construct
  source 1..50: mol_type = other DNA
gatgtcggccatcgccgcgatcatgcatgctgtcggccagtaacgatccg

SEQ ID NO: 58722 - DNA, 50 bp, synthetic construct
  source 1..50: mol_type = other DNA
ttactggccgacagcatgcggcatgcacccagcgcgccatcggcccagac

SEQ ID NO: 58723 - DNA, 50 bp, synthetic construct
  source 1..50: mol_type = other DNA
gacgctcccgtaatggagaccacccggtagtgggggctttcgaagacctc

SEQ ID NO: 58724 - DNA, 50 bp, synthetic construct
  source 1..50: mol_type = other DNA
aactgttatcgagttgttatcgggagcaaccgcggtgaaggatcccagtg

SEQ ID NO: 58725 - DNA, 50 bp, synthetic construct
  source 1..50: mol_type = other DNA
atgggggcccgttccgaatctctccggaggccccacactccggcggcgat

SEQ ID NO: 58726 - DNA, 50 bp, synthetic construct
  source 1..50: mol_type = other DNA
gttctcataacttgatagctgttcgtgaacaatttcttttttataacgaa

SEQ ID NO: 58727 - DNA, 50 bp, synthetic construct
  source 1..50: mol_type = other DNA
tctaaaacctttatttatcaagtcatgacttccaaaatcaccaaaagaga

SEQ ID NO: 58728 - DNA, 50 bp, synthetic construct
  source 1..50: mol_type = other DNA
taacctattaaaaactagtaaatttaaaattgctagtttttccagtctat

SEQ ID NO: 58729 - DNA, 50 bp, synthetic construct
  source 1..50: mol_type = other DNA
attctctttattttcttaaaaaatcacttaaaaaacaaaaaaaccacaag

SEQ ID NO: 58730 - DNA, 50 bp, synthetic construct
  source 1..50: mol_type = other DNA
attcgatacctgcataaatgtcttccgagatcattatttagaaataaatc

SEQ ID NO: 58731 - DNA, 50 bp, synthetic construct
  source 1..50: mol_type = other DNA
cgatattttcggcgtaacattctgatgtagctggccgcacgcgtcgttcc

SEQ ID NO: 58732 - DNA, 50 bp, synthetic construct
  source 1..50: mol_type = other DNA
ggattaaatgcggacagtaaaagaaatccaatactcaacagatttaatgt

SEQ ID NO: 58733 - DNA, 50 bp, synthetic construct
  source 1..50: mol_type = other DNA
agtagccccatgcagacgcccaccggcgcgggcaaggcggagggcctgga

SEQ ID NO: 58734 - DNA, 50 bp, synthetic construct
  source 1..50: mol_type = other DNA
cggcaagcacttcgtgtcgttcctgcatatccgaccgggcctgctggcct

SEQ ID NO: 58735 - DNA, 50 bp, synthetic construct
  source 1..50: mol_type = other DNA
cgtccttgtggtcggagctgccgcagtattcatccagcaccgacagggcg

SEQ ID NO: 58736 - DNA, 50 bp, synthetic construct
  source 1..50: mol_type = other DNA
accgacacatccgtggccgcgtgacgcaacgaagccacgccgctgtggga

SEQ ID NO: 58737 - DNA, 50 bp, synthetic construct
  source 1..50: mol_type = other DNA
acgcaatcgacaccagcaggctgagctcgtcggcgtgacgtgcagcgcgt

SEQ ID NO: 58738 - DNA, 50 bp, synthetic construct
  source 1..50: mol_type = other DNA
cctttgaagaggcaaaaagcaatttgacagtatctttttatcaccaaagc

SEQ ID NO: 58739 - DNA, 50 bp, synthetic construct
  source 1..50: mol_type = other DNA
aaaaaccgggcaagggaactgtttccatttagttcttcctttcgacttgc

SEQ ID NO: 58740 - DNA, 50 bp, synthetic construct
  source 1..50: mol_type = other DNA
tggcaaagaaaaagacgatagtttttcatataccgtcatttcaattctct

SEQ ID NO: 58741 - DNA, 50 bp, synthetic construct
  source 1..50: mol_type = other DNA
taatatgacaattcgcttttcaaacttatgcaaatgcactcgtcatattg

SEQ ID NO: 58742 - DNA, 50 bp, synthetic construct
  source 1..50: mol_type = other DNA
tttaagaaaagactatgaaaaagcatacattggagtagaggattttttgc

SEQ ID NO: 58743 - DNA, 50 bp, synthetic construct
  source 1..50: mol_type = other DNA
tatatcatggcttaaatattaaagaaaatcaacgaaattcaaatgtgaaa

SEQ ID NO: 58744 - DNA, 50 bp, synthetic construct
  source 1..50: mol_type = other DNA
catttgttacctgcagtatttttcggatgatgacatgcaggaaacaaaca

SEQ ID NO: 58745 - DNA, 50 bp, synthetic construct
  source 1..50: mol_type = other DNA
gtctgccgataagatattttttgtattcaagaaaacacttgctattattg

SEQ ID NO: 58746 - DNA, 50 bp, synthetic construct
  source 1..50: mol_type = other DNA
caaataagtcaagctgcccgttctgatgaagatgaagtggcagaggcagc

SEQ ID NO: 58747 - DNA, 50 bp, synthetic construct
  source 1..50: mol_type = other DNA
gccaaagtatagaagaaaagtcatataatttccttacggaatagcggggc

SEQ ID NO: 58748 - DNA, 50 bp, synthetic construct
  source 1..50: mol_type = other DNA
atggcgccgtgaagcaaaaaatatcgaggctacttggccggaggccgcag

SEQ ID NO: 58749 - DNA, 50 bp, synthetic construct
  source 1..50: mol_type = other DNA
cccgcgccaagtgagggttacctagacggggccgccgccctgggccgcga

SEQ ID NO: 58750 - DNA, 50 bp, synthetic construct
  source 1..50: mol_type = other DNA
agcgatgtgccgcgccactgataagtttatcagcggcgaaaattatcggt

SEQ ID NO: 58751 - DNA, 50 bp, synthetic construct
  source 1..50: mol_type = other DNA
tagacgaaccaaccagcgctcttgacggagaataacagtggctacgatta

SEQ ID NO: 58752 - DNA, 50 bp, synthetic construct
  source 1..50: mol_type = other DNA
ccacgattagtggccagcagctacgcactcgaccgggccatccgctgcgg

SEQ ID NO: 58753 - DNA, 50 bp, synthetic construct
  source 1..50: mol_type = other DNA
ttccacccatcagcagtcaacatcattggttttcgttctcatatttgggt

SEQ ID NO: 58754 - DNA, 50 bp, synthetic construct
  source 1..50: mol_type = other DNA
attaattagcgataagtaatttaatttgaaagtccttaattgaaagaaaa

SEQ ID NO: 58755 - DNA, 50 bp, synthetic construct
  source 1..50: mol_type = other DNA
tgtcaacggtcttcggctcggccggttcgccgatgtagacggggttggat

SEQ ID NO: 58756 - DNA, 50 bp, synthetic construct
  source 1..50: mol_type = other DNA
tggctcatctgttccttgaaaactaataaagacaaggttcagcatgaccg

SEQ ID NO: 58757 - DNA, 50 bp, synthetic construct
  source 1..50: mol_type = other DNA
tagtaaatcttccgatttttcttcaaaaagtctattatacagatttttac

SEQ ID NO: 58758 - DNA, 50 bp, synthetic construct
  source 1..50: mol_type = other DNA
aggtgagttaataaggaagtcttcatggtgaagttgttattaactattct

SEQ ID NO: 58759 - DNA, 50 bp, synthetic construct
  source 1..50: mol_type = other DNA
tgctttaccagtgcctatgaagaattttcttcgcatcaccaaaagataac

SEQ ID NO: 58760 - DNA, 50 bp, synthetic construct
  source 1..50: mol_type = other DNA
acagagtgattagtgtagtgttaaagaaggcattttcataatccgtgctg

SEQ ID NO: 58761 - DNA, 50 bp, synthetic construct
  source 1..50: mol_type = other DNA
ttataaagcctgaaaagggacaactttctccccctttttagcggagataa

SEQ ID NO: 58762 - DNA, 50 bp, synthetic construct
  source 1..50: mol_type = other DNA
aaattccaatttgctgatgaatttatgaattcaaccgcatgattgaagag

SEQ ID NO: 58763 - DNA, 50 bp, synthetic construct
  source 1..50: mol_type = other DNA
attctttcattttttcttttgatattataaaaaaataaaaattaaagaaa

SEQ ID NO: 58764 - DNA, 50 bp, synthetic construct
  source 1..50: mol_type = other DNA
aatgtcaaacgaatctgtttgacataaatgtgaacgattcgtttcgcaaa

SEQ ID NO: 58765 - DNA, 50 bp, synthetic construct
  source 1..50: mol_type = other DNA
aattaactgacgcataagagcagcaaactgatatccggcagcttttacct

SEQ ID NO: 58766 - DNA, 50 bp, synthetic construct
  source 1..50: mol_type = other DNA
ctttgcagtattttttacagtaggaattttcattacaagatataataaaa

SEQ ID NO: 58767 - DNA, 50 bp, synthetic construct
  source 1..50: mol_type = other DNA
tatgactaggagtttccgccattagaagatttactaatctaagaattgga

SEQ ID NO: 58768 - DNA, 50 bp, synthetic construct
  source 1..50: mol_type = other DNA
ctgcgtatttcttcggggtggtggcgccaagcaggccgagaaacacgccc

SEQ ID NO: 58769 - DNA, 50 bp, synthetic construct
  source 1..50: mol_type = other DNA
ccagtcgtttcgcccactattgatggcacccctactgttggaacgccggc

SEQ ID NO: 58770 - DNA, 50 bp, synthetic construct
  source 1..50: mol_type = other DNA
tcaacgtgtctgccgttgaccggccggccggtcgtgtgcaccctgctcag

SEQ ID NO: 58771 - DNA, 50 bp, synthetic construct
  source 1..50: mol_type = other DNA
ggataaaattagaaaggttgcaatcttgataagactgcctaattttatcc

SEQ ID NO: 58772 - DNA, 50 bp, synthetic construct
  source 1..50: mol_type = other DNA
gaatcttctatatcatcttctgaaaaaggagaagatactatggataaaat

SEQ ID NO: 58773 - DNA, 50 bp, synthetic construct
  source 1..50: mol_type = other DNA
acgaaagaactggacgactagccgaggggctgtccgcttagaatgtacgc

SEQ ID NO: 58774 - DNA, 50 bp, synthetic construct
  source 1..50: mol_type = other DNA
gtgaggaggtgactgcctgatgccacggtgacatcgtgaatggtgcgagc

SEQ ID NO: 58775 - DNA, 50 bp, synthetic construct
  source 1..50: mol_type = other DNA
tgtttctaattactttcttattaaaattaataaaatatgagtatgttttt

SEQ ID NO: 58776 - DNA, 50 bp, synthetic construct
  source 1..50: mol_type = other DNA
aaatttagaaattctgcattttaagcttagagtaaccattttgataatgt

SEQ ID NO: 58777 - DNA, 50 bp, synthetic construct
  source 1..50: mol_type = other DNA
acgctctaaatttatgttttataatattgccaaagaggtttttatgaagt

SEQ ID NO: 58778 - DNA, 50 bp, synthetic construct
  source 1..50: mol_type = other DNA
caccctgattaaaagtcaggtgctctgccatctcgctggtgatcagggca

SEQ ID NO: 58779 - DNA, 50 bp, synthetic construct
  source 1..50: mol_type = other DNA
tcttgtagcgggccgtgagcatctcgagttgcggatggccgactgcttga

SEQ ID NO: 58780 - DNA, 50 bp, synthetic construct
  source 1..50: mol_type = other DNA
acgatcggcagcagatctatctcgaccgaagggacactgatggcgaccgc

SEQ ID NO: 58781 - DNA, 50 bp, synthetic construct
  source 1..50: mol_type = other DNA
ttgcgggtgcgtccccccatgataatcagcgaaaccgggcgcacccactc

SEQ ID NO: 58782 - DNA, 50 bp, synthetic construct
  source 1..50: mol_type = other DNA
tcacagacatagcagaagcaaaggcagctttaattcgttgatgtgtctaa

SEQ ID NO: 58783 - DNA, 50 bp, synthetic construct
  source 1..50: mol_type = other DNA
ttcgtcgtccgtaaaaaagctcttcaaagagcacgtgtaaaacgataaat

SEQ ID NO: 58784 - DNA, 50 bp, synthetic construct
  source 1..50: mol_type = other DNA
gctgggtgctctgctgatgcaactgatctggacatggtcgagagcctgat

SEQ ID NO: 58785 - DNA, 50 bp, synthetic construct
  source 1..50: mol_type = other DNA
tctacctccaattgctttatcctttagtcaataaacagtactatcataac

SEQ ID NO: 58786 - DNA, 50 bp, synthetic construct
  source 1..50: mol_type = other DNA
accacaatggttaccatgctgcctgttttctgaatgttatcaattattca

SEQ ID NO: 58787 - DNA, 50 bp, synthetic construct
  source 1..50: mol_type = other DNA
tgggagcataacccggtaccccgaaaccgccgtacaggaaatacggttta

SEQ ID NO: 58788 - DNA, 50 bp, synthetic construct
  source 1..50: mol_type = other DNA
gcaggtagtcctcgagggtgccggtgcaacctcccagctatctaccctgc

SEQ ID NO: 58789 - DNA, 50 bp, synthetic construct
  source 1..50: mol_type = other DNA
cactaactttttttacattttgattaatgaaccattaaaacaagcagaat

SEQ ID NO: 58790 - DNA, 50 bp, synthetic construct
  source 1..50: mol_type = other DNA
attcaaacatatggaggataaacgcaggaagatcttgaacctcgttatat

SEQ ID NO: 58791 - DNA, 50 bp, synthetic construct
  source 1..50: mol_type = other DNA
ttttcgcattcctaagcgtgcatcaggaggaattactatgaaagcagcaa

SEQ ID NO: 58792 - DNA, 50 bp, synthetic construct
  source 1..50: mol_type = other DNA
tacctgggcccaactacggtgacggccatcaccgtgtgccagcgtctcga

SEQ ID NO: 58793 - DNA, 50 bp, synthetic construct
  source 1..50: mol_type = other DNA
gaccgcctgcgcgcccaaccggaggcgaacgctaaatggcccgcaccgtc

SEQ ID NO: 58794 - DNA, 50 bp, synthetic construct
  source 1..50: mol_type = other DNA
agcaccgcagaagaagataagggttgttccttatcttctttcaagcggta

SEQ ID NO: 58795 - DNA, 50 bp, synthetic construct
  source 1..50: mol_type = other DNA
ctctgaggcatatcatcattattttcagataatgaatatgtacgtgcagc

SEQ ID NO: 58796 - DNA, 50 bp, synthetic construct
  source 1..50: mol_type = other DNA
aacctccagaaagctggcaaagatttatttttttacgcttttttacggca

SEQ ID NO: 58797 - DNA, 50 bp, synthetic construct
  source 1..50: mol_type = other DNA
gagaatattgtatcatttgctttgtacaaaacagattataaaaaatctac

SEQ ID NO: 58798 - DNA, 50 bp, synthetic construct
  source 1..50: mol_type = other DNA
ccgaaggccgaaaactaaatcacgatgggccgttatttttcggacttcgg

SEQ ID NO: 58799 - DNA, 50 bp, synthetic construct
  source 1..50: mol_type = other DNA
taacaaatcttttattatcatctaaaatataataatataaagatttctat

SEQ ID NO: 58800 - DNA, 50 bp, synthetic construct
  source 1..50: mol_type = other DNA
tatgataaattgtaaattaaaagaatttttttatgttacaccttttaata

SEQ ID NO: 58801 - DNA, 50 bp, synthetic construct
  source 1..50: mol_type = other DNA
catctgtatgttttacttgaatatttattttagcataaaacagtgggaaa

SEQ ID NO: 58802 - DNA, 50 bp, synthetic construct
  source 1..50: mol_type = other DNA
ggtaagactgtctgacttcatgcattgtcatgactacacgccgtccccac

SEQ ID NO: 58803 - DNA, 50 bp, synthetic construct
  source 1..50: mol_type = other DNA
ctcctaaaaaataaaaaaccaacatttgttggtttttaaattggaatata

SEQ ID NO: 58804 - DNA, 50 bp, synthetic construct
  source 1..50: mol_type = other DNA
cttcaattttttcaggaatatttattttaagattttttaaaaaatcctaa

SEQ ID NO: 58805 - DNA, 50 bp, synthetic construct
  source 1..50: mol_type = other DNA
taattctgaaagaataggtctaaattttaaaaccaattagtggtgcatta

SEQ ID NO: 58806 - DNA, 50 bp, synthetic construct
  source 1..50: mol_type = other DNA
tagcggcccagtacgacgtcatcggcggacgccgtggtcacccgcacctt

SEQ ID NO: 58807 - DNA, 50 bp, synthetic construct
  source 1..50: mol_type = other DNA
gactgggcacctaactcagaaatcacgatttagctagcgtgcgctcgtaa

SEQ ID NO: 58808 - DNA, 50 bp, synthetic construct
  source 1..50: mol_type = other DNA
cattgaccgcctcgttcaacgcctgcgggcagcggcggaaacggattttg

SEQ ID NO: 58809 - DNA, 50 bp, synthetic construct
  source 1..50: mol_type = other DNA
gatctgttattcttgaaataacgggtcattttgcatcttcacaactgcgc

SEQ ID NO: 58810 - DNA, 50 bp, synthetic construct
  source 1..50: mol_type = other DNA
agttttatgaaactattaactcattaatgagtaaaaataataaaaaaaac

SEQ ID NO: 58811 - DNA, 50 bp, synthetic construct
  source 1..50: mol_type = other DNA
ataagctgatgcggaaacgtcatcttcattatttttcctcctctttttca

SEQ ID NO: 58812 - DNA, 50 bp, synthetic construct
  source 1..50: mol_type = other DNA
aaactaatttccctttaatatgaatattgataatcaagaaaaagagcttg

SEQ ID NO: 58813 - DNA, 50 bp, synthetic construct
  source 1..50: mol_type = other DNA
cataactttcgaaaggatcattaaacataatgagttcctcaatgattatg

SEQ ID NO: 58814 - DNA, 50 bp, synthetic construct
  source 1..50: mol_type = other DNA
ccattaaaatactaaaaaaagaactgaactaattattaaacattcaatga

SEQ ID NO: 58815 - DNA, 50 bp, synthetic construct
  source 1..50: mol_type = other DNA
actcactaactaaaacctcaattgatcattaatacaaggaggtaatgcaa

SEQ ID NO: 58816 - DNA, 50 bp, synthetic construct
  source 1..50: mol_type = other DNA
tcgccttcgccggcgatctcgcagatcgaacggcccgcccgcgatcccga

SEQ ID NO: 58817 - DNA, 50 bp, synthetic construct
  source 1..50: mol_type = other DNA
tcccaggcgcgcagcttgccgaccgcggtcgccaaggtgctcggtccctg

SEQ ID NO: 58818 - DNA, 50 bp, synthetic construct
  source 1..50: mol_type = other DNA
ctaaactgaccgtcttatttttacaaagaaagactaaattttccatagga

SEQ ID NO: 58819 - DNA, 50 bp, synthetic construct
  source 1..50: mol_type = other DNA
ttgttcatgcgctaattcaaaaaatatttattgaattatggaggattatc

SEQ ID NO: 58820 - DNA, 50 bp, synthetic construct
  source 1..50: mol_type = other DNA
tgattaaagctcctttttagaagaatatttttaaaaagtccatttaatcg

SEQ ID NO: 58821 - DNA, 50 bp, synthetic construct
  source 1..50: mol_type = other DNA
aatcgtaaaagcaggtattgttgctgaaacaaccttacaatactacgatt

SEQ ID NO: 58822 - DNA, 50 bp, synthetic construct
  source 1..50: mol_type = other DNA
tttttactatctactggtaagttaaatagcggtcttttttttaataaaaa

SEQ ID NO: 58823 - DNA, 50 bp, synthetic construct
  source 1..50: mol_type = other DNA
gatctgcatgcagctcttgagaagaactactaaaacatgctcttgaaatg

SEQ ID NO: 58824 - DNA, 50 bp, synthetic construct
  source 1..50: mol_type = other DNA
cgtaaggaatccatcgttttgttgaaaagattccgtccggcttctgtata

SEQ ID NO: 58825 - DNA, 50 bp, synthetic construct
  source 1..50: mol_type = other DNA
catacccctgttatataatggctaattgtcaaagaggggcatacggtagg

SEQ ID NO: 58826 - DNA, 50 bp, synthetic construct
  source 1..50: mol_type = other DNA
agacccgctctctttttcatatcaaatgatatgatggcagatgcgctgat

SEQ ID NO: 58827 - DNA, 50 bp, synthetic construct
  source 1..50: mol_type = other DNA
ggaggggaaaatcccacggcggaaatttggtacaaggctcattccgcgcc

SEQ ID NO: 58828 - DNA, 50 bp, synthetic construct
  source 1..50: mol_type = other DNA
tttaattaagggagacgggtgcgaccatctggcatcctctttttgtggaa

SEQ ID NO: 58829 - DNA, 50 bp, synthetic construct
  source 1..50: mol_type = other DNA
ggctcagtgcaggcggccaacaagaccttgcgcgccgcctgcggagaatg

SEQ ID NO: 58830 - DNA, 50 bp, synthetic construct
  source 1..50: mol_type = other DNA
attggttcagtcggcaccctcaacattttaaggtcacgcaccgacagaat

SEQ ID NO: 58831 - DNA, 50 bp, synthetic construct
  source 1..50: mol_type = other DNA
gcgcagttgtgaagatgcaaaatgacccgttatttcaagaataacagatc

SEQ ID NO: 58832 - DNA, 50 bp, synthetic construct
  source 1..50: mol_type = other DNA
aaagtgcgtaaaggaacaggcaggtgcatgctcactccttccacggctca

SEQ ID NO: 58833 - DNA, 50 bp, synthetic construct
  source 1..50: mol_type = other DNA
tcatatatcggttcaacggtattcatgaatgaacatgataggacgcaaag

SEQ ID NO: 58834 - DNA, 50 bp, synthetic construct
  source 1..50: mol_type = other DNA
gtcttttagatttcccttcctgaagcgcccccaacggagaacttaaagag

SEQ ID NO: 58835 - DNA, 50 bp, synthetic construct
  source 1..50: mol_type = other DNA
tatcaaaccgtcccatccatcatggggcaacgggaggggagtctttgatg

SEQ ID NO: 58836 - DNA, 50 bp, synthetic construct
  source 1..50: mol_type = other DNA
gccccttgtcaggacgctttggaaattcaggtacaaatccttcaaacggt

SEQ ID NO: 58837 - DNA, 50 bp, synthetic construct
  source 1..50: mol_type = other DNA
tagttcattatgtgcacaatttaatacatcattgagaagatacttactgc

SEQ ID NO: 58838 - DNA, 50 bp, synthetic construct
  source 1..50: mol_type = other DNA
gctactttaggggccatagtggctgcaatcattatgttaatataagtgag

SEQ ID NO: 58839 - DNA, 50 bp, synthetic construct
  source 1..50: mol_type = other DNA
gcgacgcatggttcgcctgcgcaggcggtgggcggctgagcatgaaatgc

SEQ ID NO: 58840 - DNA, 50 bp, synthetic construct
  source 1..50: mol_type = other DNA
cccatcagattctgcgcgacgatggccagtctggtcagcaagatgatgcg

SEQ ID NO: 58841 - DNA, 50 bp, synthetic construct
  source 1..50: mol_type = other DNA
tagctcatctgtaataataagttgatttcatttatcataagcatgatctt

SEQ ID NO: 58842 - DNA, 50 bp, synthetic construct
  source 1..50: mol_type = other DNA
ggaacttttaaacttttgtttatgtaccttaacctaagtccgaaaacacc

SEQ ID NO: 58843 - DNA, 50 bp, synthetic construct
  source 1..50: mol_type = other DNA
cctgacgcctgtcgaactcgcgctgcagatggaatacgccgcgcggtggg

SEQ ID NO: 58844 - DNA, 50 bp, synthetic construct
  source 1..50: mol_type = other DNA
cggatgatctgcgacagcatcgacgagtcgacgagggctttcggacaccc

SEQ ID NO: 58845 - DNA, 50 bp, synthetic construct
  source 1..50: mol_type = other DNA
agtacatatcatttaacatagaataagtcttacgttaaatgatatgtaca

SEQ ID NO: 58846 - DNA, 50 bp, synthetic construct
  source 1..50: mol_type = other DNA
aacgcagggcttgaaaagaggcctcatggcctcttttgttggccttggtg

SEQ ID NO: 58847 - DNA, 50 bp, synthetic construct
  source 1..50: mol_type = other DNA
ccgaacaccccgccaccgcatcgccggagcgcacccggcataatgggcgg

SEQ ID NO: 58848 - DNA, 50 bp, synthetic construct
  source 1..50: mol_type = other DNA
catgttggaggcaggtcatgagattgattacagcactcgccctcgagctg

SEQ ID NO: 58849 - DNA, 50 bp, synthetic construct
  source 1..50: mol_type = other DNA
gagtatttggcttagtaaatttatttttttgtttgttaaagaaaaataac

SEQ ID NO: 58850 - DNA, 50 bp, synthetic construct
  source 1..50: mol_type = other DNA
gttaaacgtgatagctagttcctttaatggagagatcgaatatgtttgga

SEQ ID NO: 58851 - DNA, 50 bp, synthetic construct
  source 1..50: mol_type = other DNA
ataattcttttcataatttgtaaatttctacaaattttctgtgaaattct

SEQ ID NO: 58852 - DNA, 50 bp, synthetic construct
  source 1..50: mol_type = other DNA
ggcggccttagcccgcgtcttcacatgaggccacccggttaaaggtggcc

SEQ ID NO: 58853 - DNA, 50 bp, synthetic construct
  source 1..50: mol_type = other DNA
gtcgcactgctgacgccggatgaccggtcatcccagagagtgccgccgcg

SEQ ID NO: 58854 - DNA, 50 bp, synthetic construct
  source 1..50: mol_type = other DNA
gcctctcgcgaggaccgcttaaaagcgagaaaggagtcccgatgaaagaa

SEQ ID NO: 58855 - DNA, 50 bp, synthetic construct
  source 1..50: mol_type = other DNA
actcctgccattgatcctcctcggcgccactcggggtcaggggcttttct

SEQ ID NO: 58856 - DNA, 50 bp, synthetic construct
  source 1..50: mol_type = other DNA
gagtcggtacgcgggacacggcgccgagccggtgtggggcgcaggggccg

SEQ ID NO: 58857 - DNA, 50 bp, synthetic construct
  source 1..50: mol_type = other DNA
atttaacaagttttcggtttgtagtacttaaattcacttgatatttaaat

SEQ ID NO: 58858 - DNA, 50 bp, synthetic construct
  source 1..50: mol_type = other DNA
tagtttagaagaaaataattatattaatcaaactattttattttttgtct

SEQ ID NO: 58859 - DNA, 50 bp, synthetic construct
  source 1..50: mol_type = other DNA
ttttcatattatttatgattatttcaaaatgaggtgtcataacatgaaac

SEQ ID NO: 58860 - DNA, 50 bp, synthetic construct
  source 1..50: mol_type = other DNA
ctattcgtactttctaaacttaacattaactatttacttctttacaattt

SEQ ID NO: 58861 - DNA, 50 bp, synthetic construct
  source 1..50: mol_type = other DNA
tactttctgataagctgtgccattacttcttttttgtttatcgtagagtc

SEQ ID NO: 58862 - DNA, 50 bp, synthetic construct
  source 1..50: mol_type = other DNA
atatagtttgtcacatatgttaattgattaacttatataacaaactatta

SEQ ID NO: 58863 - DNA, 50 bp, synthetic construct
  source 1..50: mol_type = other DNA
ttaacattaagtttccttttaattgctccttcctggagcttttcttttat

SEQ ID NO: 58864 - DNA, 50 bp, synthetic construct
  source 1..50: mol_type = other DNA
ttataagaaaagtgcctactttttcttcacaatgtttgtttttcatataa

SEQ ID NO: 58865 - DNA, 50 bp, synthetic construct
  source 1..50: mol_type = other DNA
aaatttctagaaaagaaataatacggtggatattatgttatcattcctaa

SEQ ID NO: 58866 - DNA, 50 bp, synthetic construct
  source 1..50: mol_type = other DNA
gctatctgtattaggcgggattttataaaaaagatattatagatgatagg

SEQ ID NO: 58867 - DNA, 50 bp, synthetic construct
  source 1..50: mol_type = other DNA
tactaaatactaaaaataatgtacttagacatttttttgtacaatcagtt

SEQ ID NO: 58868 - DNA, 50 bp, synthetic construct
  source 1..50: mol_type = other DNA
tatcgggacgccagcagccgacagatctggtttccactgttgtcgcccac

SEQ ID NO: 58869 - DNA, 50 bp, synthetic construct
  source 1..50: mol_type = other DNA
aaattcaatttttaaggggtccatcaagctgttgcttgtgtggtgaatgt

SEQ ID NO: 58870 - DNA, 50 bp, synthetic construct
  source 1..50: mol_type = other DNA
ttggaatcacctaaggaagagaacaattgtgtgaattaaggttattgcaa

SEQ ID NO: 58871 - DNA, 50 bp, synthetic construct
  source 1..50: mol_type = other DNA
gttttggccatttcttttcgctccttttagtaaaaataaggaggaaaaaa

SEQ ID NO: 58872 - DNA, 50 bp, synthetic construct
  source 1..50: mol_type = other DNA
ctaaaaaataccaagaaaatgaactctggctccttcttaggagtttttct

SEQ ID NO: 58873 - DNA, 50 bp, synthetic construct
  source 1..50: mol_type = other DNA
tccgattattccagaaagcttattcgtataaaaaatacaaatgaggaggc

SEQ ID NO: 58874 - DNA, 50 bp, synthetic construct
  source 1..50: mol_type = other DNA
caatacaaaattaggaaaaaaagtatatatttgtttatatatttgtataa

SEQ ID NO: 58875 - DNA, 50 bp, synthetic construct
  source 1..50: mol_type = other DNA
aaatattttatcttttccgaaacgttttgaatggaatatccaaaaggtat

SEQ ID NO: 58876 - DNA, 50 bp, synthetic construct
  source 1..50: mol_type = other DNA
agcaagttaatcccttgcgggaacatattcctattaaaaatattcttgta

SEQ ID NO: 58877 - DNA, 50 bp, synthetic construct
  source 1..50: mol_type = other DNA
ctgctgttccaaaatttctcactccttatggagaagtcgtggaagagatc

SEQ ID NO: 58878 - DNA, 50 bp, synthetic construct
  source 1..50: mol_type = other DNA
tgaactaccacatcgcaatcgaccgtcagcgtcgccgggatggtttttac

SEQ ID NO: 58879 - DNA, 50 bp, synthetic construct
  source 1..50: mol_type = other DNA
taccgagctgctccaccccgcgtcagtaggaaatgtattgtaggtatctc

SEQ ID NO: 58880 - DNA, 50 bp, synthetic construct
  source 1..50: mol_type = other DNA
tctatccgcgttcgtcgtaatcatcgagtgtgccggcgctgtcggacaga

SEQ ID NO: 58881 - DNA, 50 bp, synthetic construct
  source 1..50: mol_type = other DNA
catcggggtgcccatagccgtcgccgtcggcgtatatgggctccccggcc

SEQ ID NO: 58882 - DNA, 50 bp, synthetic construct
  source 1..50: mol_type = other DNA
gatggtgaagttggagccgctttgattcaagcggcaagtcattgacttaa

SEQ ID NO: 58883 - DNA, 50 bp, synthetic construct
  source 1..50: mol_type = other DNA
attaataataattatctgctttttttaaaatacggaggttgtttatgggg

SEQ ID NO: 58884 - DNA, 50 bp, synthetic construct
  source 1..50: mol_type = other DNA
gaaccagatacagccccagtcctgcgccggactgttaatccgtaggtccc

SEQ ID NO: 58885 - DNA, 50 bp, synthetic construct
  source 1..50: mol_type = other DNA
cagtcagcatcacgatgcccaggttgctctgggctttttttggctacaaa

SEQ ID NO: 58886 - DNA, 50 bp, synthetic construct
  source 1..50: mol_type = other DNA
atacaaatacctgattttgcgcatgcggtctcaaaatcaccgctttcaag

SEQ ID NO: 58887 - DNA, 50 bp, synthetic construct
  source 1..50: mol_type = other DNA
ttttgtacgccgccgcccgccatcgagcaggcggttgttaatccgaccgc

SEQ ID NO: 58888 - DNA, 50 bp, synthetic construct
  source 1..50: mol_type = other DNA
gtactcttttatgatgatattcagtactgtagatcttctttcagcggtaa

SEQ ID NO: 58889 - DNA, 50 bp, synthetic construct
  source 1..50: mol_type = other DNA
caccagtattgcggtggtgactttcgatggcgctgtcctcagtcagcgtg

SEQ ID NO: 58890 - DNA, 50 bp, synthetic construct
  source 1..50: mol_type = other DNA
cacgctggcggtcgagctcctcgagctccttgagttcttccgcgcgctcc

SEQ ID NO: 58891 - DNA, 50 bp, synthetic construct
  source 1..50: mol_type = other DNA
tgttacgtctcatattttcatctaaatcgattgctcaacgaaaaaagcag

SEQ ID NO: 58892 - DNA, 50 bp, synthetic construct
  source 1..50: mol_type = other DNA
agggactattgatctatctggcagcgcaacctgatagccaaaaaggagat

SEQ ID NO: 58893 - DNA, 50 bp, synthetic construct
  source 1..50: mol_type = other DNA
gtgataaaataaacttaagcatttattgttgggtaaaaaaagatgtgtca

SEQ ID NO: 58894 - DNA, 50 bp, synthetic construct
  source 1..50: mol_type = other DNA
gattaactactttatatccatcttttcaaatgtttttaaattacttatca

SEQ ID NO: 58895 - DNA, 50 bp, synthetic construct
  source 1..50: mol_type = other DNA
ttttgacatagcattaacctcaatattttcaatttcctgacttgttaaaa

SEQ ID NO: 58896 - DNA, 50 bp, synthetic construct
  source 1..50: mol_type = other DNA
agtataggctttaatttttctatacttatattaaaaacagaccctttacg

SEQ ID NO: 58897 - DNA, 50 bp, synthetic construct
  source 1..50: mol_type = other DNA
aattctgaaagaataggtctgaatttcttctaactgtccctttttctatc

SEQ ID NO: 58898 - DNA, 50 bp, synthetic construct
  source 1..50: mol_type = other DNA
tattataaaaaatatattaaaaaaacttttataaattttttctgctatat

SEQ ID NO: 58899 - DNA, 50 bp, synthetic construct
  source 1..50: mol_type = other DNA
agcctactgccgtgtgtcaacggatcaacggaagcgaaccaaagtactct

SEQ ID NO: 58900 - DNA, 50 bp, synthetic construct
  source 1..50: mol_type = other DNA
ctcagacccagaataagatttttgatcaaaaaagatatttatattcagag

SEQ ID NO: 58901 - DNA, 50 bp, synthetic construct
  source 1..50: mol_type = other DNA
cccttaaatcatcaaacacaatcaataaacacctttgatcctggcaaggg

SEQ ID NO: 58902 - DNA, 50 bp, synthetic construct
  source 1..50: mol_type = other DNA
atgctgatggatgaggcgcatcgctaacaatgggcaacagaaaatcacat

SEQ ID NO: 58903 - DNA, 50 bp, synthetic construct
  source 1..50: mol_type = other DNA
aaaatttttttcacgcctttttcgatcgcggcagccatgagtcaaatgag

SEQ ID NO: 58904 - DNA, 50 bp, synthetic construct
  source 1..50: mol_type = other DNA
agtcaccaccatcccagcaacccgcaatggttgccgagaacatggttggc

SEQ ID NO: 58905 - DNA, 50 bp, synthetic construct
  source 1..50: mol_type = other DNA
cagtctgctgatttggatgccaagattccgcgataataacttgctatata

SEQ ID NO: 58906 - DNA, 50 bp, synthetic construct
  source 1..50: mol_type = other DNA
tcccgccctgccgggctatttctacggcgggatagctggactgcagaaat

SEQ ID NO: 58907 - DNA, 50 bp, synthetic construct
  source 1..50: mol_type = other DNA
ccgcgacatcctcctcgcacagcacccacttacgtacccagatcgcatac

SEQ ID NO: 58908 - DNA, 50 bp, synthetic construct
  source 1..50: mol_type = other DNA
gagccgcgcgggcgctggtctgggccgcccaggtgccgccggcgcgggcg

SEQ ID NO: 58909 - DNA, 50 bp, synthetic construct
  source 1..50: mol_type = other DNA
gaaggtgcttaacgctcccaccagccaagctgagaaactcaagcacctct

SEQ ID NO: 58910 - DNA, 50 bp, synthetic construct
  source 1..50: mol_type = other DNA
gcatgcggattcctttcactcgacccatcggttgctgctgtagctcagtg

SEQ ID NO: 58911 - DNA, 50 bp, synthetic construct
  source 1..50: mol_type = other DNA
ctcaatcccaggttgccctttcggtacggaaaggagggacttcccttgaa

SEQ ID NO: 58912 - DNA, 50 bp, synthetic construct
  source 1..50: mol_type = other DNA
acccaatcagtagtgaggagccttatagatgccctgactgatgatactgt

SEQ ID NO: 58913 - DNA, 50 bp, synthetic construct
  source 1..50: mol_type = other DNA
taatgcttacgaagaaattgctctgcaaggtgtgttccatccaaatgtta

SEQ ID NO: 58914 - DNA, 50 bp, synthetic construct
  source 1..50: mol_type = other DNA
gagtttcaaaagagaaaggtcaagtttctgacctgttctgcctgaatctc

SEQ ID NO: 58915 - DNA, 50 bp, synthetic construct
  source 1..50: mol_type = other DNA
taaggatcaggccgtgccagtggcgcccggcttaagcggccattgccggg

SEQ ID NO: 58916 - DNA, 50 bp, synthetic construct
  source 1..50: mol_type = other DNA
tacatcattacccgaaactgttccaggcggcgggttcgcgccatgatggt

SEQ ID NO: 58917 - DNA, 50 bp, synthetic construct
  source 1..50: mol_type = other DNA
tttagatctttatcgcaaaaaactcaagtttttatcaatataatttgaaa

SEQ ID NO: 58918 - DNA, 50 bp, synthetic construct
  source 1..50: mol_type = other DNA
taggttatttttactttttactttttacttcaaaaatcaaaaataaaatt

SEQ ID NO: 58919 - DNA, 50 bp, synthetic construct
  source 1..50: mol_type = other DNA
aacgcaatgccgctttgatgagcgccgtgcctgaatagcttcagcagatt

SEQ ID NO: 58920 - DNA, 50 bp, synthetic construct
  source 1..50: mol_type = other DNA
ctttctctcttgtaaacaaaaagcgagcttagaaattagaactttaaaat

SEQ ID NO: 58921 - DNA, 50 bp, synthetic construct
  source 1..50: mol_type = other DNA
tcacaatgggttgaccggcatcgcccttcgggcagcccaacgatataaac

SEQ ID NO: 58922 - DNA, 50 bp, synthetic construct
  source 1..50: mol_type = other DNA
ccgcgcagcctggcgcgcatgctccgctgcacccgctccagcgtgcgctc

SEQ ID NO: 58923 - DNA, 50 bp, synthetic construct
  source 1..50: mol_type = other DNA
cggatccgcggatgcggcgccaacgcgttcggagtcgacgagcgccttcg

SEQ ID NO: 58924 - DNA, 50 bp, synthetic construct
  source 1..50: mol_type = other DNA
cgacgggtaacgttaaatcacttattagagtgatgtatagtacggaagga

SEQ ID NO: 58925 - DNA, 50 bp, synthetic construct
  source 1..50: mol_type = other DNA
atatcgctcaaaaaatagctcattataatgagtgataaaaaagttgatat

SEQ ID NO: 58926 - DNA, 50 bp, synthetic construct
  source 1..50: mol_type = other DNA
cagtagcctatggctgcggattacgatgtgttggataccataagttactc

SEQ ID NO: 58927 - DNA, 50 bp, synthetic construct
  source 1..50: mol_type = other DNA
gccaaaattggtttcatagggcaaatttaaacaatgaaaatgataatgta

SEQ ID NO: 58928 - DNA, 50 bp, synthetic construct
  source 1..50: mol_type = other DNA
cgcatggtcctgcgcaccgatcacttctgcagcaggcgccggaaatatcc

SEQ ID NO: 58929 - DNA, 50 bp, synthetic construct
  source 1..50: mol_type = other DNA
tttttttattttttgtgtcatatttttatattacagattcttttcaaaaa

SEQ ID NO: 58930 - DNA, 50 bp, synthetic construct
  source 1..50: mol_type = other DNA
aatttttttattttttgtgtcatatttatatcctgaaaagagcaagaaat

SEQ ID NO: 58931 - DNA, 50 bp, synthetic construct
  source 1..50: mol_type = other DNA
tgcctcacaagaggatcaggaagccaacttcgtgaacctattgaagaagg

SEQ ID NO: 58932 - DNA, 50 bp, synthetic construct
  source 1..50: mol_type = other DNA
tgttgtggtaaagtaataaaatcagttgttgtaattctttttctatgaca

SEQ ID NO: 58933 - DNA, 50 bp, synthetic construct
  source 1..50: mol_type = other DNA
ggaattcaaaaaaatcgggatcgccggggattatctttttacaaccgtcc

SEQ ID NO: 58934 - DNA, 50 bp, synthetic construct
  source 1..50: mol_type = other DNA
gcgctggacaaaggcgaccacctcgcgcgatccgcgaccttgtcaaactg

SEQ ID NO: 58935 - DNA, 50 bp, synthetic construct
  source 1..50: mol_type = other DNA
tccatagaacacgacctcaagaaatttttcttgcgtccgtaatcacggca

SEQ ID NO: 58936 - DNA, 50 bp, synthetic construct
  source 1..50: mol_type = other DNA
ttccgaataggaaaacgctaaggccagtcttaatagtttccatctctatc

SEQ ID NO: 58937 - DNA, 50 bp, synthetic construct
  source 1..50: mol_type = other DNA
taacaaccctcctcaaagtatttacttaaatacctgcaaatactttccat

SEQ ID NO: 58938 - DNA, 50 bp, synthetic construct
  source 1..50: mol_type = other DNA
atgagctcacaaaaaacatttggtaccgtaattgatttcgctaagctcat

SEQ ID NO: 58939 - DNA, 50 bp, synthetic construct
  source 1..50: mol_type = other DNA
ctgggactagtgaaggacatgaaaaatggtatgtgattcacctatctcac

SEQ ID NO: 58940 - DNA, 50 bp, synthetic construct
  source 1..50: mol_type = other DNA
tttttctcttttttataattaagaatagtcaacttaaaaaaagcggctaa

SEQ ID NO: 58941 - DNA, 50 bp, synthetic construct
  source 1..50: mol_type = other DNA
cttatttagtagcaatgtcaaaatatatgttgacaattaatattaattta

SEQ ID NO: 58942 - DNA, 50 bp, synthetic construct
  source 1..50: mol_type = other DNA
ccattgaattggtaatttctttcatatgaaacatattgcaagtacaatct

SEQ ID NO: 58943 - DNA, 50 bp, synthetic construct
  source 1..50: mol_type = other DNA
tattgtattattatctaccacatcaagatgccacggatcataacaacagt

SEQ ID NO: 58944 - DNA, 50 bp, synthetic construct
  source 1..50: mol_type = other DNA
gtcctatcattaattttgtaaacagagttggacgccggaaatgaaagaac

SEQ ID NO: 58945 - DNA, 50 bp, synthetic construct
  source 1..50: mol_type = other DNA
aacattgaaaagaattgcatcaattccttgatatgacttgatttaatttc

SEQ ID NO: 58946 - DNA, 50 bp, synthetic construct
  source 1..50: mol_type = other DNA
tgctggtggccgcaggctggaagccgggaaaaagcctataaggcagcaat

SEQ ID NO: 58947 - DNA, 50 bp, synthetic construct
  source 1..50: mol_type = other DNA
gaaatgaacgaccacgcggaaaattatgttacagattattcgttaatttc

SEQ ID NO: 58948 - DNA, 50 bp, synthetic construct
  source 1..50: mol_type = other DNA
cataaaataatctcacagtagaataatggttgatctgagatagaaaagtc

SEQ ID NO: 58949 - DNA, 50 bp, synthetic construct
  source 1..50: mol_type = other DNA
aaaactttataaaataaccccacttatcgtgtattattttatactagttt

SEQ ID NO: 58950 - DNA, 50 bp, synthetic construct
  source 1..50: mol_type = other DNA
gatcaagtaagggatttctttgaaaaagcaaagaaacgcaaacagccggt

SEQ ID NO: 58951 - DNA, 50 bp, synthetic construct
  source 1..50: mol_type = other DNA
gcaactaagggtgtaagcggagatgcttaacctcgtataatcagtatatt

SEQ ID NO: 58952 - DNA, 50 bp, synthetic construct
  source 1..50: mol_type = other DNA
agttcacttgctagttccgtgttgctaaaccgcattgaagcagagggtgg

SEQ ID NO: 58953 - DNA, 50 bp, synthetic construct
  source 1..50: mol_type = other DNA
catttccacaagtgtgaaagctttaaaaagctctttttcttgtacccatt

SEQ ID NO: 58954 - DNA, 50 bp, synthetic construct
  source 1..50: mol_type = other DNA
gaattaagtatattaatatccgttgtaaaatataaagatatagaaaaagg

SEQ ID NO: 58955 - DNA, 50 bp, synthetic construct
  source 1..50: mol_type = other DNA
ctctaataaagtagaacagcccaaatttgctactgaaaactttattattt

SEQ ID NO: 58956 - DNA, 50 bp, synthetic construct
  source 1..50: mol_type = other DNA
tggcattctaacagtaagtataggcgattacagttacttttaaagacggt

SEQ ID NO: 58957 - DNA, 50 bp, synthetic construct
  source 1..50: mol_type = other DNA
gtctttagtcgttgttgtaggacctgtgtcctccagagaatttaaacaat

SEQ ID NO: 58958 - DNA, 50 bp, synthetic construct
  source 1..50: mol_type = other DNA
aggtatatagttccacttgaagattaatcttcatgttttaagatgtattc

SEQ ID NO: 58959 - DNA, 50 bp, synthetic construct
  source 1..50: mol_type = other DNA
cgaacccttgacctctgcgttgcgaacacaacctgttatgctgtttttcc

SEQ ID NO: 58960 - DNA, 50 bp, synthetic construct
  source 1..50: mol_type = other DNA
tcgtcagcggtgtcgaatatgaagatttgcacattcgacaaaccaatttt

SEQ ID NO: 58961 - DNA, 50 bp, synthetic construct
  source 1..50: mol_type = other DNA
atcccaactttgggaacgggagcgatcgaactctgcccaatctttggtgt

SEQ ID NO: 58962 - DNA, 50 bp, synthetic construct
  source 1..50: mol_type = other DNA
ggggttgcacaaaggttgttgccttaagctagatggcttttgcccacccc

SEQ ID NO: 58963 - DNA, 50 bp, synthetic construct
  source 1..50: mol_type = other DNA
catagctatgctacagaacgacccaagggtctttctgtactctattttat

SEQ ID NO: 58964 - DNA, 50 bp, synthetic construct
  source 1..50: mol_type = other DNA
gtacacaccgtttttccaagtcccatacgatatccgtaaggtgtgtgtcc

SEQ ID NO: 58965 - DNA, 50 bp, synthetic construct
  source 1..50: mol_type = other DNA
tatttttctatattatgtaatcttataagaagaaataatatttaacattt

SEQ ID NO: 58966 - DNA, 50 bp, synthetic construct
  source 1..50: mol_type = other DNA
gccaaatttatcaagtattcagcccatagaatatcatggataaatttagc

SEQ ID NO: 58967 - DNA, 50 bp, synthetic construct
  source 1..50: mol_type = other DNA
atctgaaacaggaaaatgagattcgcgagaaatatcgtcccgtcataggc

SEQ ID NO: 58968 - DNA, 50 bp, synthetic construct
  source 1..50: mol_type = other DNA
gcattcgacggataagtaccgcagagtcatatttcaactcaaagaaggag

SEQ ID NO: 58969 - DNA, 50 bp, synthetic construct
  source 1..50: mol_type = other DNA
gaatagcgtcaaggcgggcctgacgaggctacccgcttggcctctgcctc

SEQ ID NO: 58970 - DNA, 50 bp, synthetic construct
  source 1..50: mol_type = other DNA
catccgcgaggaggctgtccgctgtggagccatcacgcactccgtccgtg

SEQ ID NO: 58971 - DNA, 50 bp, synthetic construct
  source 1..50: mol_type = other DNA
atcgttttttcgctgctctgcttcctgaacagtctgttggataataagat

SEQ ID NO: 58972 - DNA, 50 bp, synthetic construct
  source 1..50: mol_type = other DNA
tttgtactcctcgttttgttattttaaagcatacaaatgagacaataaaa

SEQ ID NO: 58973 - DNA, 50 bp, synthetic construct
  source 1..50: mol_type = other DNA
gtacgtcaagttatctacgtgaccacgttcacatattcaaagttgtttgt

SEQ ID NO: 58974 - DNA, 50 bp, synthetic construct
  source 1..50: mol_type = other DNA
ataacaaatttagatactcttgtttcaagtagcgtatctaaaactcttat

SEQ ID NO: 58975 - DNA, 50 bp, synthetic construct
  source 1..50: mol_type = other DNA
tagatcagcagatctacgggccttatgccgcccttagtgaggcagttctt

SEQ ID NO: 58976 - DNA, 50 bp, synthetic construct
  source 1..50: mol_type = other DNA
taagggccctcttgaatcagcaaaattttatacgcaagcttgggcctata

SEQ ID NO: 58977 - DNA, 50 bp, synthetic construct
  source 1..50: mol_type = other DNA
ataagagttttagatacgctacttgaaacaagagtatctaaatttgttat

SEQ ID NO: 58978 - DNA, 50 bp, synthetic construct
  source 1..50: mol_type = other DNA
cagcaggaaagcaccctcaactatcatagaataagaaaacacgcctgctg

SEQ ID NO: 58979 - DNA, 50 bp, synthetic construct
  source 1..50: mol_type = other DNA
gcttattttgaaagcaaaatatttataaaaatcacaaaaaaataatacgg

SEQ ID NO: 58980 - DNA, 50 bp, synthetic construct
  source 1..50: mol_type = other DNA
ctttaaaaataagcagagcatttttgaaaatgtcaaggagtgatttaaat

SEQ ID NO: 58981 - DNA, 50 bp, synthetic construct
  source 1..50: mol_type = other DNA
ctatgaaacattacagaagcaggcccacatcattctgatagatttcatac

SEQ ID NO: 58982 - DNA, 50 bp, synthetic construct
  source 1..50: mol_type = other DNA
atggtttctccaaatacccacagctcgctgtttttatgtggttatctctg

SEQ ID NO: 58983 - DNA, 50 bp, synthetic construct
  source 1..50: mol_type = other DNA
tgtttacctccttgttgtgtcgtatattcagcacaacaactgtgtaatgg

SEQ ID NO: 58984 - DNA, 50 bp, synthetic construct
  source 1..50: mol_type = other DNA
tctgacgggcggaacccctcccgtcagcggcaagaacacagaccgtccga

SEQ ID NO: 58985 - DNA, 50 bp, synthetic construct
  source 1..50: mol_type = other DNA
atctgcgacaaaattgattactatatgtcgccccagaagatgtcgtttat

SEQ ID NO: 58986 - DNA, 50 bp, synthetic construct
  source 1..50: mol_type = other DNA
acggaaattgaataacgattaaaattttttattagtcattttcctgctgt

SEQ ID NO: 58987 - DNA, 50 bp, synthetic construct
  source 1..50: mol_type = other DNA
ctatatattcgccatatttaataaggattttaaaatgacagaaattatat

SEQ ID NO: 58988 - DNA, 50 bp, synthetic construct
  source 1..50: mol_type = other DNA
ataaaattgctttttttagttaaatatggctataatttcaagcacttttt

SEQ ID NO: 58989 - DNA, 50 bp, synthetic construct
  source 1..50: mol_type = other DNA
tatttataaaacggtcagtcttatgaaagagactgaccgttttataatct

SEQ ID NO: 58990 - DNA, 50 bp, synthetic construct
  source 1..50: mol_type = other DNA
tctgtccataaacaaaaccttgttaaaactgcgtttcgtttgggggcaga

SEQ ID NO: 58991 - DNA, 50 bp, synthetic construct
  source 1..50: mol_type = other DNA
tattgccgtttcaagataccttgtattttgggtttagtgtttgcacagtt

SEQ ID NO: 58992 - DNA, 50 bp, synthetic construct
  source 1..50: mol_type = other DNA
aacatcggaatccctcctttgcgccggcgagcaatcggttatccgatcgc

SEQ ID NO: 58993 - DNA, 50 bp, synthetic construct
  source 1..50: mol_type = other DNA
gcctccttctttgagttgaaatatgacaagttcaaatcaaaattaaaggc

SEQ ID NO: 58994 - DNA, 50 bp, synthetic construct
  source 1..50: mol_type = other DNA
tagaagtccgatgacggggcgatatttcctcctccgtcagatgtcttgtg

SEQ ID NO: 58995 - DNA, 50 bp, synthetic construct
  source 1..50: mol_type = other DNA
attctctgcttgactacaaacctgaaccgctttaccgtctactattctgt

SEQ ID NO: 58996 - DNA, 50 bp, synthetic construct
  source 1..50: mol_type = other DNA
ccatcagccagtccgtgatctatcggaccaggatctggagctgctgaagc

SEQ ID NO: 58997 - DNA, 50 bp, synthetic construct
  source 1..50: mol_type = other DNA
taaaaaagattagtgaatttgctttttggctgcttcggaaatggatttac

SEQ ID NO: 58998 - DNA, 50 bp, synthetic construct
  source 1..50: mol_type = other DNA
ctaatatatgtagtatcatccataaataaggcttattttatatataatag

SEQ ID NO: 58999 - DNA, 50 bp, synthetic construct
  source 1..50: mol_type = other DNA
ttcatgcactcatcaatagtgttcatagggacacaagttgacagcatgtc

SEQ ID NO: 59000 - DNA, 50 bp, synthetic construct
  source 1..50: mol_type = other DNA
atcatttatcatttgtttgcataaatttcacctccgaaaacaacaatacc

SEQ ID NO: 59001 - DNA, 50 bp, synthetic construct
  source 1..50: mol_type = other DNA
ccatctgaaaacaaacctctgatttttctccgcaagctgttttcacatta

SEQ ID NO: 59002 - DNA, 50 bp, synthetic construct
  source 1..50: mol_type = other DNA
agacttttaagggtttagcgttgttttgaaagcgtggattttaaatccaa

SEQ ID NO: 59003 - DNA, 50 bp, synthetic construct
  source 1..50: mol_type = other DNA
tcataactattgaagcaaatgcgcctcttgatttggggcaatgcttatgc

SEQ ID NO: 59004 - DNA, 50 bp, synthetic construct
  source 1..50: mol_type = other DNA
cgtccgtccagctttcgcggcgggagcccgcggcaaagcctaagcggaga

SEQ ID NO: 59005 - DNA, 50 bp, synthetic construct
  source 1..50: mol_type = other DNA
atacgcaggggcaagcgtgtcaacgccacgcgccgcttgaccattgagtt

SEQ ID NO: 59006 - DNA, 50 bp, synthetic construct
  source 1..50: mol_type = other DNA
aagagaggcagttaattttatgcccaggaaacctgacccttgccattctt

SEQ ID NO: 59007 - DNA, 50 bp, synthetic construct
  source 1..50: mol_type = other DNA
cccttttacaagtccggtataaaaagttttccaccgcgctgcctaccggc

SEQ ID NO: 59008 - DNA, 50 bp, synthetic construct
  source 1..50: mol_type = other DNA
tttattattttagtaacattttagtatcttaattaaaataaatttataag

SEQ ID NO: 59009 - DNA, 50 bp, synthetic construct
  source 1..50: mol_type = other DNA
tggtgttggacttggcattttattctagaaaaagttattctccaacacca

SEQ ID NO: 59010 - DNA, 50 bp, synthetic construct
  source 1..50: mol_type = other DNA
gcaagtcaatatctgaaaatagaagttgtttctttctcttattgtaatct

SEQ ID NO: 59011 - DNA, 50 bp, synthetic construct
  source 1..50: mol_type = other DNA
actggtacaagccagtcattaacgggcgttgaccactgccagcagcttgt

SEQ ID NO: 59012 - DNA, 50 bp, synthetic construct
  source 1..50: mol_type = other DNA
tataaagaaatatcatcaaatatcatacagtttgaagaggttgatgtatc

SEQ ID NO: 59013 - DNA, 50 bp, synthetic construct
  source 1..50: mol_type = other DNA
ggaagaaacgcagggtggcaggttatatttgaacctattgaggttcttgc

SEQ ID NO: 59014 - DNA, 50 bp, synthetic construct
  source 1..50: mol_type = other DNA
ggagatatacattgacaccttgcagagaaaaacaatgggattattattcc

SEQ ID NO: 59015 - DNA, 50 bp, synthetic construct
  source 1..50: mol_type = other DNA
ttaaaaatgtatcgaaatgtatttttaatagtatattgcggtcttttgca

SEQ ID NO: 59016 - DNA, 50 bp, synthetic construct
  source 1..50: mol_type = other DNA
atgactattataaaaataatcctgataatcaaaaattttattttaatcat

SEQ ID NO: 59017 - DNA, 50 bp, synthetic construct
  source 1..50: mol_type = other DNA
atataaaaaagtaaaatattctaatatttaaaattagaacttttattacc

SEQ ID NO: 59018 - DNA, 50 bp, synthetic construct
  source 1..50: mol_type = other DNA
gtgacaaatttactttcttgcattgaaatgaacgtaagtaaatttctcaa

SEQ ID NO: 59019 - DNA, 50 bp, synthetic construct
  source 1..50: mol_type = other DNA
cctaacactacacagcaagcaaatgcttgggcctatagctcaggggtaga

SEQ ID NO: 59020 - DNA, 50 bp, synthetic construct
  source 1..50: mol_type = other DNA
aatttgattaatgatataatagtatagcccatgttatcaataattcaatt

SEQ ID NO: 59021 - DNA, 50 bp, synthetic construct
  source 1..50: mol_type = other DNA
ctatcacttcaaaacccatatatcaaaaaatatgcaaaccgccgtgatat

SEQ ID NO: 59022 - DNA, 50 bp, synthetic construct
  source 1..50: mol_type = other DNA
gattgtggacggagtagaaaaagaaggatttgtcttccagaattacaatc

SEQ ID NO: 59023 - DNA, 50 bp, synthetic construct
  source 1..50: mol_type = other DNA
aatgtgcttataaaagaaagatattaaaatcttatatttataaggataac

SEQ ID NO: 59024 - DNA, 50 bp, synthetic construct
  source 1..50: mol_type = other DNA
ggtaacagtcttgatcttgtctccaaaaagctaaggttaaagcttttaca

SEQ ID NO: 59025 - DNA, 50 bp, synthetic construct
  source 1..50: mol_type = other DNA
ctcgtagcctcacgctctcggtctgcagacacagtagtctatgtgaccag

SEQ ID NO: 59026 - DNA, 50 bp, synthetic construct
  source 1..50: mol_type = other DNA
tgttgtactaacgtgacactacccgttggctgtgttaagttagtacaaaa

SEQ ID NO: 59027 - DNA, 50 bp, synthetic construct
  source 1..50: mol_type = other DNA
tatttttgagtctgtcctcatttccggaaaggagaaagacatgaacatta

SEQ ID NO: 59028 - DNA, 50 bp, synthetic construct
  source 1..50: mol_type = other DNA
ctgcccctaaccttgaaagctcaggactgtttcgtctgcactcggcacaa

SEQ ID NO: 59029 - DNA, 50 bp, synthetic construct
  source 1..50: mol_type = other DNA
ctctcttttccaaaagtacagtttaaaaggcaacagcttgaacaaaatct

SEQ ID NO: 59030 - DNA, 50 bp, synthetic construct
  source 1..50: mol_type = other DNA
ctttttttctatttaaaatcattttatattatgagagcttatttgcaaat

SEQ ID NO: 59031 - DNA, 50 bp, synthetic construct
  source 1..50: mol_type = other DNA
tatgctcaagaatcaagctattaagcctgttctaatctgggttctcttgg

SEQ ID NO: 59032 - DNA, 50 bp, synthetic construct
  source 1..50: mol_type = other DNA
aattctagtatttatgataataaaattttatgcctagaattactagaatt

SEQ ID NO: 59033 - DNA, 50 bp, synthetic construct
  source 1..50: mol_type = other DNA
atggaagtggatgtttgattagggatgcctcattcaacactatctttaaa

SEQ ID NO: 59034 - DNA, 50 bp, synthetic construct
  source 1..50: mol_type = other DNA
tgcgaagctgattcatggcctggatgtaaactctacgaataaattttaca

SEQ ID NO: 59035 - DNA, 50 bp, synthetic construct
  source 1..50: mol_type = other DNA
ttttagattacaccccctcactttggaaaatgaaagaaactaaactaaat

SEQ ID NO: 59036 - DNA, 50 bp, synthetic construct
  source 1..50: mol_type = other DNA
ttggatttggtgggcataaaagtcattacagttataccggccaaaaaact

SEQ ID NO: 59037 - DNA, 50 bp, synthetic construct
  source 1..50: mol_type = other DNA
tccttccggaagcagaaccgcccactgcctttaatctgtttccggaaaga

SEQ ID NO: 59038 - DNA, 50 bp, synthetic construct
  source 1..50: mol_type = other DNA
actcatttcattcgttcaccccaaggacggcgtgatgaaagaattcgttg

SEQ ID NO: 59039 - DNA, 50 bp, synthetic construct
  source 1..50: mol_type = other DNA
attcttctttttatcattattgataatctctcatagtaaaaaagaaaaat

SEQ ID NO: 59040 - DNA, 50 bp, synthetic construct
  source 1..50: mol_type = other DNA
tttatgtagggtccttttatgagttaacactacaaatccaattactaaaa

SEQ ID NO: 59041 - DNA, 50 bp, synthetic construct
  source 1..50: mol_type = other DNA
agaaaagtaaccgcgataccggctacggtgcgtatccatattctgacgaa

SEQ ID NO: 59042 - DNA, 50 bp, synthetic construct
  source 1..50: mol_type = other DNA
gccaagcgtacgaagagtggttcacgacaacggatgagcgaacacatgaa

SEQ ID NO: 59043 - DNA, 50 bp, synthetic construct
  source 1..50: mol_type = other DNA
ctgccaaccgtagccatggtggcgtcgattatccatgcatctgtttgcat

SEQ ID NO: 59044 - DNA, 50 bp, synthetic construct
  source 1..50: mol_type = other DNA
ttttttaagataaggagtattttattggtatatctcctttgctgcttgta

SEQ ID NO: 59045 - DNA, 50 bp, synthetic construct
  source 1..50: mol_type = other DNA
ctgtgcaaacactaaacccaaaattaggtgcggaattagagttcgttcat

SEQ ID NO: 59046 - DNA, 50 bp, synthetic construct
  source 1..50: mol_type = other DNA
atcatacgctccttatcgtgcaaaaattttcacggaagtaaaggaatatg

SEQ ID NO: 59047 - DNA, 50 bp, synthetic construct
  source 1..50: mol_type = other DNA
gtcattaattggagaatttgagaaatatgtcactttttcaaaaaagaaaa

SEQ ID NO: 59048 - DNA, 50 bp, synthetic construct
  source 1..50: mol_type = other DNA
aaaatcaataaagattttgtgctgaacaggaaaaaattctctccatattt

SEQ ID NO: 59049 - DNA, 50 bp, synthetic construct
  source 1..50: mol_type = other DNA
attcaaaagtaaattatgatgagatgcaatttcaaaatggcaaagcctat

SEQ ID NO: 59050 - DNA, 50 bp, synthetic construct
  source 1..50: mol_type = other DNA
ataaaaaatttttttaaaaatatgtacattattttaaaaaaatattaaag

SEQ ID NO: 59051 - DNA, 50 bp, synthetic construct
  source 1..50: mol_type = other DNA
taaaagtaaaataagctgtagccctatccttacagcttccttttctttta

SEQ ID NO: 59052 - DNA, 50 bp, synthetic construct
  source 1..50: mol_type = other DNA
tcacctgattagctcatgtctatacattcaaaatcttgcacctcaagtga

SEQ ID NO: 59053 - DNA, 50 bp, synthetic construct
  source 1..50: mol_type = other DNA
aataagcggctactctgatctttttcaaattgcaagtgttttttagaatt

SEQ ID NO: 59054 - DNA, 50 bp, synthetic construct
  source 1..50: mol_type = other DNA
gtggcttcgtagatgaaaattatactcataatcttcatgttttaatatgt

SEQ ID NO: 59055 - DNA, 50 bp, synthetic construct
  source 1..50: mol_type = other DNA
tgaaaccatgaaaacagacatatataagcatataataattcatgtcatgg

SEQ ID NO: 59056 - DNA, 50 bp, synthetic construct
  source 1..50: mol_type = other DNA
ccaattcatggcggtttttctttttaaaaatcaatacggttttgtctcga

SEQ ID NO: 59057 - DNA, 50 bp, synthetic construct
  source 1..50: mol_type = other DNA
tctttatactgaatacattgtattataattaataagctagaaactaactg

SEQ ID NO: 59058 - DNA, 50 bp, synthetic construct
  source 1..50: mol_type = other DNA
actcctttttttaggttaccttgtttaatctctcatagtaaaaaaggaaa

SEQ ID NO: 59059 - DNA, 50 bp, synthetic construct
  source 1..50: mol_type = other DNA
agaagatacaaaaacagacgttcttaagaaaaggttttttgaaggaagtg

SEQ ID NO: 59060 - DNA, 50 bp, synthetic construct
  source 1..50: mol_type = other DNA
tctgtcattgaattaccagatgtaatttcgactgcggaatcaggaacaga

SEQ ID NO: 59061 - DNA, 50 bp, synthetic construct
  source 1..50: mol_type = other DNA
cctcacccatatggaaatgtgtaggtcctttccaaggcagatgcgctgaa

SEQ ID NO: 59062 - DNA, 50 bp, synthetic construct
  source 1..50: mol_type = other DNA
tcatctccgttgatggagattttcagcaaaatcggcatcaaaacggcggc

SEQ ID NO: 59063 - DNA, 50 bp, synthetic construct
  source 1..50: mol_type = other DNA
gtgacttttttaggctctatgtcaatcagcataactgtaccaataggcac

SEQ ID NO: 59064 - DNA, 50 bp, synthetic construct
  source 1..50: mol_type = other DNA
gtattctttcagaattgatagtaaattatttatattttccacttgatgac

SEQ ID NO: 59065 - DNA, 50 bp, synthetic construct
  source 1..50: mol_type = other DNA
tgtatgagatggaaaaaatcaataattctctatattttccacttgataac

SEQ ID NO: 59066 - DNA, 50 bp, synthetic construct
  source 1..50: mol_type = other DNA
attttcacaatcgtattttttatattcatctatgaacaaattaaaaaaat

SEQ ID NO: 59067 - DNA, 50 bp, synthetic construct
  source 1..50: mol_type = other DNA
tgtttctctggatgatttttcagaaaggtgaaagggtatccaagaaaaca

SEQ ID NO: 59068 - DNA, 50 bp, synthetic construct
  source 1..50: mol_type = other DNA
ccgtatcagtttgccgagcagtttataaagggatggggagaaatcaagaa

SEQ ID NO: 59069 - DNA, 50 bp, synthetic construct
  source 1..50: mol_type = other DNA
aaaattcctctataaattaatattcgaatatttgtttaaggaggtttttt

SEQ ID NO: 59070 - DNA, 50 bp, synthetic construct
  source 1..50: mol_type = other DNA
aatcctctcaaagtcttacaattctttcattgaaaacagtagagaaaatc

SEQ ID NO: 59071 - DNA, 50 bp, synthetic construct
  source 1..50: mol_type = other DNA
ctttccaataaggattctgcctcagaaatggccaaatccgtaaccacgat

SEQ ID NO: 59072 - DNA, 50 bp, synthetic construct
  source 1..50: mol_type = other DNA
ttattgaatatttcttgagaaataattattgcttcatggctattttctac

SEQ ID NO: 59073 - DNA, 50 bp, synthetic construct
  source 1..50: mol_type = other DNA
ttttttatcttatttttcaattaatttacattgtcaaagctcatttgaag

SEQ ID NO: 59074 - DNA, 50 bp, synthetic construct
  source 1..50: mol_type = other DNA
tgcagccacacggcattttggcttttctccgaaaaatacggcgaacgcga

SEQ ID NO: 59075 - DNA, 50 bp, synthetic construct
  source 1..50: mol_type = other DNA
tccgatttttgtcaccgttttcatggataaagacagaatactcgcactgg

SEQ ID NO: 59076 - DNA, 50 bp, synthetic construct
  source 1..50: mol_type = other DNA
tgaaaaccatcacgaggctatcatcactgcttttagagtgatgaatagta

SEQ ID NO: 59077 - DNA, 50 bp, synthetic construct
  source 1..50: mol_type = other DNA
ttgtggtttttttgtttttctaagtgatttttttaagaaaataaagaaaa

SEQ ID NO: 59078 - DNA, 50 bp, synthetic construct
  source 1..50: mol_type = other DNA
aattacatgttcaaaatcagccatatatgtggaattatgaaaagagactt

SEQ ID NO: 59079 - DNA, 50 bp, synthetic construct
  source 1..50: mol_type = other DNA
agagtataaaaaataaacccttgcggggcagagcatattttttacgaaaa

SEQ ID NO: 59080 - DNA, 50 bp, synthetic construct
  source 1..50: mol_type = other DNA
agcctccctattttgtaagttttatgccaatgtatcaaaatatggaggta

SEQ ID NO: 59081 - DNA, 50 bp, synthetic construct
  source 1..50: mol_type = other DNA
attgtaagttttgaagatataaattaaaagatgaatagaaaaattacaac

SEQ ID NO: 59082 - DNA, 50 bp, synthetic construct
  source 1..50: mol_type = other DNA
tatttaataaggtcgctaagacttttatcattgagccatcttgctatatc

SEQ ID NO: 59083 - DNA, 50 bp, synthetic construct
  source 1..50: mol_type = other DNA
accgaatcccttgaagaaaagcaggccttatttttatcatggtgtatccg

SEQ ID NO: 59084 - DNA, 50 bp, synthetic construct
  source 1..50: mol_type = other DNA
agcgccgcacgtttcggcataaaaatttttatgcggaattatctgccgcg

SEQ ID NO: 59085 - DNA, 50 bp, synthetic construct
  source 1..50: mol_type = other DNA
gaatacatcttaaaacatgaagattaatcttcaagtggaactatatacct

SEQ ID NO: 59086 - DNA, 50 bp, synthetic construct
  source 1..50: mol_type = other DNA
ttgcagtctttttgaggttttatggttatatcacctactattagctgata

SEQ ID NO: 59087 - DNA, 50 bp, synthetic construct
  source 1..50: mol_type = other DNA
atttattcgataaaagtaaaataagctgtgccttcatttattgaataaaa

SEQ ID NO: 59088 - DNA, 50 bp, synthetic construct
  source 1..50: mol_type = other DNA
agttatcaaaaacagatacaagaattttcttgtacctattttatcaaaaa

SEQ ID NO: 59089 - DNA, 50 bp, synthetic construct
  source 1..50: mol_type = other DNA
ggtttaattccttgtcaaggaaacgggataggtacggtggggattaaccc

SEQ ID NO: 59090 - DNA, 50 bp, synthetic construct
  source 1..50: mol_type = other DNA
catcgtgggcggtcttccgcgatatattactttaccttgtgagcttgatg

SEQ ID NO: 59091 - DNA, 50 bp, synthetic construct
  source 1..50: mol_type = other DNA
ttttcctttttcgctatgagagattagtaaaatctgatgaaaatagaacg

SEQ ID NO: 59092 - DNA, 50 bp, synthetic construct
  source 1..50: mol_type = other DNA
aaaagaattttagtgacgctgattgaaatgaaggatagtaaaattcttta

SEQ ID NO: 59093 - DNA, 50 bp, synthetic construct
  source 1..50: mol_type = other DNA
tatatagtgtatattacaaagtgctaatgctttgtattttactttttaac

SEQ ID NO: 59094 - DNA, 50 bp, synthetic construct
  source 1..50: mol_type = other DNA
cttctacacctcactttccagaaggccctatataaattgaggtgagacgt

SEQ ID NO: 59095 - DNA, 50 bp, synthetic construct
  source 1..50: mol_type = other DNA
tatccaattttgccttccctttgttttcaaacagaagtctaacctgatca

SEQ ID NO: 59096 - DNA, 50 bp, synthetic construct
  source 1..50: mol_type = other DNA
cgtttttcatagtccgaaaaatttaaaaattttttggacattaaaatagg

SEQ ID NO: 59097 - DNA, 50 bp, synthetic construct
  source 1..50: mol_type = other DNA
gtgacaaatttactttctttgtttgaaaatagcgtaactaaatttatcaa

SEQ ID NO: 59098 - DNA, 50 bp, synthetic construct
  source 1..50: mol_type = other DNA
tccattttttcaaaatcttgcatacgatttcaaaacacggaggttatatc

SEQ ID NO: 59099 - DNA, 50 bp, synthetic construct
  source 1..50: mol_type = other DNA
tatatcaaggaattttgggcataatctcatctcgaaaactgtccgcctgc

SEQ ID NO: 59100 - DNA, 50 bp, synthetic construct
  source 1..50: mol_type = other DNA
tttttctttttgtgttctgtcatatttttcttcttcggccaaaagccgga

SEQ ID NO: 59101 - DNA, 50 bp, synthetic construct
  source 1..50: mol_type = other DNA
ttctttgagttgaaatatgacttcatatagtaccgcccattctcctccac

SEQ ID NO: 59102 - DNA, 50 bp, synthetic construct
  source 1..50: mol_type = other DNA
tgaatgcccacttgatgatgctctcatagccatcgccgaacaaggattct

SEQ ID NO: 59103 - DNA, 50 bp, synthetic construct
  source 1..50: mol_type = other DNA
gcccgaggaatacgaggaggccgtcgacgtgctcatcccatcaatcggct

SEQ ID NO: 59104 - DNA, 50 bp, synthetic construct
  source 1..50: mol_type = other DNA
tccgtaggaaaagaacctcatcgtccattatggcgctgtttaagatgatt

SEQ ID NO: 59105 - DNA, 50 bp, synthetic construct
  source 1..50: mol_type = other DNA
gtattcacgtttacaaaattcaaacttcttctaggaggaaaaatgaatat

SEQ ID NO: 59106 - DNA, 50 bp, synthetic construct
  source 1..50: mol_type = other DNA
atttcataatggtggggttctgggcggccattaagattgcacctccgaat

SEQ ID NO: 59107 - DNA, 50 bp, synthetic construct
  source 1..50: mol_type = other DNA
gataaaatagacagattcattatcatcaaaatcccaatgaccattttatg

SEQ ID NO: 59108 - DNA, 50 bp, synthetic construct
  source 1..50: mol_type = other DNA
tagagtaatatcagagaacggcttgcattaggttcaaagatattgtttgg

SEQ ID NO: 59109 - DNA, 50 bp, synthetic construct
  source 1..50: mol_type = other DNA
gtgtatcaattattttattcatatcgataaactcactgtcagtgatagtg

SEQ ID NO: 59110 - DNA, 50 bp, synthetic construct
  source 1..50: mol_type = other DNA
gaagtaaaacagaatattttatatataacacaagaaaggaagatttacga

SEQ ID NO: 59111 - DNA, 50 bp, synthetic construct
  source 1..50: mol_type = other DNA
tcaagtggaaaatataaataattttaaaatttttgataaaaagtactttc

SEQ ID NO: 59112 - DNA, 50 bp, synthetic construct
  source 1..50: mol_type = other DNA
cctcgtcggttagccgctcccccgcaccaggcagcggcctacttgcggac

SEQ ID NO: 59113 - DNA, 50 bp, synthetic construct
  source 1..50: mol_type = other DNA
atgtcgaatgcttataaaataattaacgcatttttatagcgtaacgacat

SEQ ID NO: 59114 - DNA, 50 bp, synthetic construct
  source 1..50: mol_type = other DNA
gagcgcttggacagaccgccttaaagaagaggagccgcaaaagcggctcc

SEQ ID NO: 59115 - DNA, 50 bp, synthetic construct
  source 1..50: mol_type = other DNA
cccttgcagggcgaaaaaatgtgtgtatggatattttcggacttcaatgg

SEQ ID NO: 59116 - DNA, 50 bp, synthetic construct
  source 1..50: mol_type = other DNA
gcggaaatagatccccccattccacaaccagtggatggagggataagctc

SEQ ID NO: 59117 - DNA, 50 bp, synthetic construct
  source 1..50: mol_type = other DNA
cgcctgttcgcgcgcgtgatcttcgcatgcgcggcgcgtgcatgcgggcg

SEQ ID NO: 59118 - DNA, 50 bp, synthetic construct
  source 1..50: mol_type = other DNA
agttgcattttggtcggccggcggcctcgacgaattgcccgaattcaacc

SEQ ID NO: 59119 - DNA, 50 bp, synthetic construct
  source 1..50: mol_type = other DNA
gcgtcctatcgctttgccgacaagtgcgatcaggcatgcccctagtcctc

SEQ ID NO: 59120 - DNA, 50 bp, synthetic construct
  source 1..50: mol_type = other DNA
aagtcgctcggctcagtcggtgacgcgtcacggtctgggccggaatgtcg

SEQ ID NO: 59121 - DNA, 50 bp, synthetic construct
  source 1..50: mol_type = other DNA
aaacttttaatttttcttctactgttctatttataaaaaattaaaagtgc

SEQ ID NO: 59122 - DNA, 50 bp, synthetic construct
  source 1..50: mol_type = other DNA
aaatgacagctagcttccatagaaatcttcattgagggggtttgttaaga

SEQ ID NO: 59123 - DNA, 50 bp, synthetic construct
  source 1..50: mol_type = other DNA
cattcaacatgtcctgtatagtaaacgatgaagtcatatttcaactcaaa

SEQ ID NO: 59124 - DNA, 50 bp, synthetic construct
  source 1..50: mol_type = other DNA
ccttggcgatcgccttctccaggcgcgccagcggatcttccccgcgtaga

SEQ ID NO: 59125 - DNA, 50 bp, synthetic construct
  source 1..50: mol_type = other DNA
aaattcttaaagattttatcgaccaaagctgagaaaatcaatcggctttc

SEQ ID NO: 59126 - DNA, 50 bp, synthetic construct
  source 1..50: mol_type = other DNA
cattcattataccactcctctaaaattttataggagatgtagaaaaaata

SEQ ID NO: 59127 - DNA, 50 bp, synthetic construct
  source 1..50: mol_type = other DNA
aacgtgtttttttagacaacgtcctatgagtttgtcaaataaaacttcat

SEQ ID NO: 59128 - DNA, 50 bp, synthetic construct
  source 1..50: mol_type = other DNA
gcatccccgtattttttatgatatttatatctgtgacgactgcgggacgg

SEQ ID NO: 59129 - DNA, 50 bp, synthetic construct
  source 1..50: mol_type = other DNA
aagcaggacaggctgcaggtggcggccatcaaatagtaattgtcctcgtt

SEQ ID NO: 59130 - DNA, 50 bp, synthetic construct
  source 1..50: mol_type = other DNA
tcggggtaacgcctcggagtgcagccttggacagttttgtctatagtcga

SEQ ID NO: 59131 - DNA, 50 bp, synthetic construct
  source 1..50: mol_type = other DNA
aagttgtagtaaccgttcgcttaatattacccgaaaaggttcgggaactt

SEQ ID NO: 59132 - DNA, 50 bp, synthetic construct
  source 1..50: mol_type = other DNA
tcaaatacgtcgaggcctatttccagtttggtagaaaataacgtaattcg

SEQ ID NO: 59133 - DNA, 50 bp, synthetic construct
  source 1..50: mol_type = other DNA
agacaaacgctaatttgatttgtggtcctctatataattacttttataga

SEQ ID NO: 59134 - DNA, 50 bp, synthetic construct
  source 1..50: mol_type = other DNA
cccaaccaaagagcgtcagcggcaagctgcgttgacgcaagttggtttac

SEQ ID NO: 59135 - DNA, 50 bp, synthetic construct
  source 1..50: mol_type = other DNA
cctgccgctcgcatcgacgaagtcaattctttatcacaaagaaaggaggg

SEQ ID NO: 59136 - DNA, 50 bp, synthetic construct
  source 1..50: mol_type = other DNA
cacttgatgttttcggtcccggaaggaggtggcggagaatgccaaaagta

SEQ ID NO: 59137 - DNA, 50 bp, synthetic construct
  source 1..50: mol_type = other DNA
gcttgccacaatactcaaagtctccagttaggcagaatattgtgagtgcg

SEQ ID NO: 59138 - DNA, 50 bp, synthetic construct
  source 1..50: mol_type = other DNA
agatatttgttctaagctcataccatacaatatttatagaaaaggaattg

SEQ ID NO: 59139 - DNA, 50 bp, synthetic construct
  source 1..50: mol_type = other DNA
ataatttttatcctctctaaaagatatcttcaagaatgcgttcaaatttt

SEQ ID NO: 59140 - DNA, 50 bp, synthetic construct
  source 1..50: mol_type = other DNA
atacacctcttgatagtttaaaaatggctcttttatttgaataggtgccc

SEQ ID NO: 59141 - DNA, 50 bp, synthetic construct
  source 1..50: mol_type = other DNA
tcgttttattccttgatgtgcctgagtagggaaaacaatgaataaaacga

SEQ ID NO: 59142 - DNA, 50 bp, synthetic construct
  source 1..50: mol_type = other DNA
tatccaacaaacatatttgttgaaaagaataatcgcttgttcaactgaaa

SEQ ID NO: 59143 - DNA, 50 bp, synthetic construct
  source 1..50: mol_type = other DNA
acctcggtggcgactgctgcggtaaccgccgcgggcgattgaaccgtcag

SEQ ID NO: 59144 - DNA, 50 bp, synthetic construct
  source 1..50: mol_type = other DNA
agcaatttcgcctcggctcattgtcgctgttttcgccgagcgaatacggc

SEQ ID NO: 59145 - DNA, 50 bp, synthetic construct
  source 1..50: mol_type = other DNA
tttaataaatgctacatacaaattatcattgataacaaatacgtattaaa

SEQ ID NO: 59146 - DNA, 50 bp, synthetic construct
  source 1..50: mol_type = other DNA
tgatacacaaatacttttttcatgttagtgaaatgaaacaatgtgttggg

SEQ ID NO: 59147 - DNA, 50 bp, synthetic construct
  source 1..50: mol_type = other DNA
agagaacaattatatcatcatgtcaagacgcgctgtaggtatcgtcgtca

SEQ ID NO: 59148 - DNA, 50 bp, synthetic construct
  source 1..50: mol_type = other DNA
ccccgggggggggggtccttttaaaaggccaaggaaaaccttttccgggg

SEQ ID NO: 59149 - DNA, 50 bp, synthetic construct
  source 1..50: mol_type = other DNA
tattcacaaaacatgaggacttatttgagctaaaccagtaattatgaata

SEQ ID NO: 59150 - DNA, 50 bp, synthetic construct
  source 1..50: mol_type = other DNA
gccctaaactcgctgcttaaaaatttattttgcagttaaaagtttaaaaa

SEQ ID NO: 59151 - DNA, 50 bp, synthetic construct
  source 1..50: mol_type = other DNA
caataaagcttttatataaattctttttaggtattaaaaaagctttcgag

SEQ ID NO: 59152 - DNA, 50 bp, synthetic construct
  source 1..50: mol_type = other DNA
tctttgacggatagtttctcactgtgcgcccagagctggcccgggtagcg

SEQ ID NO: 59153 - DNA, 50 bp, synthetic construct
  source 1..50: mol_type = other DNA
ttgggcgatgctccgggactattccggccgagctgacgatcgccgcgtca

SEQ ID NO: 59154 - DNA, 50 bp, synthetic construct
  source 1..50: mol_type = other DNA
tcggcgtacgtgcgtcgacagagtatacttctacgatccaacactgctct

SEQ ID NO: 59155 - DNA, 50 bp, synthetic construct
  source 1..50: mol_type = other DNA
cgctaattcctgatttattgcaatatcgccacgtagatcaggaatcgcac

SEQ ID NO: 59156 - DNA, 50 bp, synthetic construct
  source 1..50: mol_type = other DNA
gtgctaaacctgtgggatctttaaattccgtagctcagctggtagagcaa

SEQ ID NO: 59157 - DNA, 50 bp, synthetic construct
  source 1..50: mol_type = other DNA
aggcttccccggatggctgatgatatgtcatcagatgtcgctggatagta

SEQ ID NO: 59158 - DNA, 50 bp, synthetic construct
  source 1..50: mol_type = other DNA
aaaaaacgccaataaaacaatatgtacataatcttcatgtgacatggtaa

SEQ ID NO: 59159 - DNA, 50 bp, synthetic construct
  source 1..50: mol_type = other DNA
tatcttttcttggcgtacattgtatcaacgtttaccgccactaaaaaata

SEQ ID NO: 59160 - DNA, 50 bp, synthetic construct
  source 1..50: mol_type = other DNA
aaaccagtaaacgtaagcggctaattttaggtttattcatttacatccat

SEQ ID NO: 59161 - DNA, 50 bp, synthetic construct
  source 1..50: mol_type = other DNA
cgcttttcgggcataatctgtgccagggcaaaattattgctaacgggacg

SEQ ID NO: 59162 - DNA, 50 bp, synthetic construct
  source 1..50: mol_type = other DNA
tagaataaagcctttaaattacaataatgtgaattatgtgaattaccagt

SEQ ID NO: 59163 - DNA, 50 bp, synthetic construct
  source 1..50: mol_type = other DNA
tctcagccgccgggggctgtatgatttataacagctaatttaccctgagt

SEQ ID NO: 59164 - DNA, 50 bp, synthetic construct
  source 1..50: mol_type = other DNA
caaaagcgatacccaatactaccaaagatcgtgagtataagttattttta

SEQ ID NO: 59165 - DNA, 50 bp, synthetic construct
  source 1..50: mol_type = other DNA
caattccttttctataaatattgtatggtatgagcttagaacaaatatcc

SEQ ID NO: 59166 - DNA, 50 bp, synthetic construct
  source 1..50: mol_type = other DNA
actgagataccaatatagcaaaaagtttttgttgtgcgtgttacctctcc

SEQ ID NO: 59167 - DNA, 50 bp, synthetic construct
  source 1..50: mol_type = other DNA
gaaggagctgatttttggtgttcaaatgttagtcactaaaattattaatt

SEQ ID NO: 59168 - DNA, 50 bp, synthetic construct
  source 1..50: mol_type = other DNA
tggaggggcctatgcacacgccgcgaacggcgccagttcgcgcgcgaccg

SEQ ID NO: 59169 - DNA, 50 bp, synthetic construct
  source 1..50: mol_type = other DNA
atcccagatacaacagccatgaattaatctttgcctgtaataaagaagat

SEQ ID NO: 59170 - DNA, 50 bp, synthetic construct
  source 1..50: mol_type = other DNA
aataatatgcacgttaccgctggccaaccagcggttcatgctcgctgagg

SEQ ID NO: 59171 - DNA, 50 bp, synthetic construct
  source 1..50: mol_type = other DNA
atgagcagaacaaagacagctaaaaatatctctcaaatttttccgatgaa

SEQ ID NO: 59172 - DNA, 50 bp, synthetic construct
  source 1..50: mol_type = other DNA
ataccgaagttctgtggcgactgatcgcaggaaagatacaaattcggtat

SEQ ID NO: 59173 - DNA, 50 bp, synthetic construct
  source 1..50: mol_type = other DNA
tacgaatatagctgagttttcatgtacttaaacgtcgtaccttattataa

SEQ ID NO: 59174 - DNA, 50 bp, synthetic construct
  source 1..50: mol_type = other DNA
cgcccggttgtactcgcgcccgtcgcccacccggcgaccccaaactggcg

SEQ ID NO: 59175 - DNA, 50 bp, synthetic construct
  source 1..50: mol_type = other DNA
ggcttattgcttacctcccgttcgataacccccgcctaaagtaaaaagcc

SEQ ID NO: 59176 - DNA, 50 bp, synthetic construct
  source 1..50: mol_type = other DNA
cgttggtttcaacgctaaaagtaaagcttatttagaaaaacttgtgcatg

SEQ ID NO: 59177 - DNA, 50 bp, synthetic construct
  source 1..50: mol_type = other DNA
ttatatatattatcataataacatatttgttgttgttctaatatatctaa

SEQ ID NO: 59178 - DNA, 50 bp, synthetic construct
  source 1..50: mol_type = other DNA
aactgagaggttcatatatagaatttatcgcacctgtacaagctattttt

SEQ ID NO: 59179 - DNA, 50 bp, synthetic construct
  source 1..50: mol_type = other DNA
ttggccagccgattgccccgaaccttgtcgcgccacatcttctcggcgta

SEQ ID NO: 59180 - DNA, 50 bp, synthetic construct
  source 1..50: mol_type = other DNA
caggcaattgtctcaaatgtggtttcactcaaatttgatgataattcaag

SEQ ID NO: 59181 - DNA, 50 bp, synthetic construct
  source 1..50: mol_type = other DNA
taacatatatcactctaaaaataatattaaatttagattgccatatattt

SEQ ID NO: 59182 - DNA, 50 bp, synthetic construct
  source 1..50: mol_type = other DNA
caattacaattataatattagtattaaaacttttattttaggagtgattt

SEQ ID NO: 59183 - DNA, 50 bp, synthetic construct
  source 1..50: mol_type = other DNA
gttcgaacctgcggcctgatggtcccaaagaggtggccgccaccatgaat

SEQ ID NO: 59184 - DNA, 50 bp, synthetic construct
  source 1..50: mol_type = other DNA
aaatggcgcatacgccctatggctatagccgtaggcattatcgttatctt

SEQ ID NO: 59185 - DNA, 50 bp, synthetic construct
  source 1..50: mol_type = other DNA
ttgagaagtgttacttccttaattgggaacctttatgttccccttctctg

SEQ ID NO: 59186 - DNA, 50 bp, synthetic construct
  source 1..50: mol_type = other DNA
caacaaaccccacaactcaccctaattgaacggactttcaggagtcaatt

SEQ ID NO: 59187 - DNA, 50 bp, synthetic construct
  source 1..50: mol_type = other DNA
agcaaatttcatagtaaaacccccatattaaatttactaattaatcgcaa

SEQ ID NO: 59188 - DNA, 50 bp, synthetic construct
  source 1..50: mol_type = other DNA
tatataaaagttgtaataagttttccggtctctcacacaatttttatatg

SEQ ID NO: 59189 - DNA, 50 bp, synthetic construct
  source 1..50: mol_type = other DNA
accctggagcgcgtacagaactggcgtgtcgaatcgttccgctacagcgg

SEQ ID NO: 59190 - DNA, 50 bp, synthetic construct
  source 1..50: mol_type = other DNA
gccgccctggtcctcgccgcgtgcgggcggacggccatgacccgcgtcgc

SEQ ID NO: 59191 - DNA, 50 bp, synthetic construct
  source 1..50: mol_type = other DNA
attgagttaaccttttattttatgatcattatcagtgatgttgaagcagg

SEQ ID NO: 59192 - DNA, 50 bp, synthetic construct
  source 1..50: mol_type = other DNA
cgcgatcggccgccgatgaggcggcccgccccgacccccggaggaccgac

SEQ ID NO: 59193 - DNA, 50 bp, synthetic construct
  source 1..50: mol_type = other DNA
gtcgtgcaaggcttttcatccttgaaaaagggtgataagcctctcttgct

SEQ ID NO: 59194 - DNA, 50 bp, synthetic construct
  source 1..50: mol_type = other DNA
caagcaaggcggtgacatcatcatcagggatcccgtcctcgacgcggatg

SEQ ID NO: 59195 - DNA, 50 bp, synthetic construct
  source 1..50: mol_type = other DNA
tcaaaataaacaaaggcgaagaggaagagattcagcttttttggtttgga

SEQ ID NO: 59196 - DNA, 50 bp, synthetic construct
  source 1..50: mol_type = other DNA
aattgccaacaactataactcgctctgaatgttcagaagtgtgggggatt

SEQ ID NO: 59197 - DNA, 50 bp, synthetic construct
  source 1..50: mol_type = other DNA
accactaaagctaaaacggatgcctaggagggcgtatggaatatagtaaa

SEQ ID NO: 59198 - DNA, 50 bp, synthetic construct
  source 1..50: mol_type = other DNA
gatgcagcgacatatgccgcttggatcgccctgtaactgttcgggagttc

SEQ ID NO: 59199 - DNA, 50 bp, synthetic construct
  source 1..50: mol_type = other DNA
gtttcttgatacaagtaagaattataactatctgcttcttgataagaaca

SEQ ID NO: 59200 - DNA, 50 bp, synthetic construct
  source 1..50: mol_type = other DNA
cgccagccaggaagcgacctgggcggccgaaggtggcagaatgggacctg

SEQ ID NO: 59201 - DNA, 50 bp, synthetic construct
  source 1..50: mol_type = other DNA
cataatatctttgccctgtgggcacatgctatcagggcggcatgaagatc

SEQ ID NO: 59202 - DNA, 50 bp, synthetic construct
  source 1..50: mol_type = other DNA
gcaatatagtcatgaaaatacatgatcagataatatagaatctatattta

SEQ ID NO: 59203 - DNA, 50 bp, synthetic construct
  source 1..50: mol_type = other DNA
tccctttatataaaaattatcaatttcctcataatttttaattgaaaacg

SEQ ID NO: 59204 - DNA, 50 bp, synthetic construct
  source 1..50: mol_type = other DNA
tttagaaagcttatctcgcgcaacagtttatgcgtatgcaggtttcttgt

SEQ ID NO: 59205 - DNA, 50 bp, synthetic construct
  source 1..50: mol_type = other DNA
aaatctggcagaaatttccccgacgcttctgggatatggctgaaagatca

SEQ ID NO: 59206 - DNA, 50 bp, synthetic construct
  source 1..50: mol_type = other DNA
caaggggaactggacgcactcggacagagagccgaatccagtatgccaaa

SEQ ID NO: 59207 - DNA, 50 bp, synthetic construct
  source 1..50: mol_type = other DNA
tctgtatctgaatagtttccttctcgatgtggacactctgatgtagatat

SEQ ID NO: 59208 - DNA, 50 bp, synthetic construct
  source 1..50: mol_type = other DNA
aaaaattttttgatatttttttcatcgcaaaactcccaatcggcgttttt

SEQ ID NO: 59209 - DNA, 50 bp, synthetic construct
  source 1..50: mol_type = other DNA
tgattcgtggtctccatatgctcgtccctgcatattcatacaacggattt

SEQ ID NO: 59210 - DNA, 50 bp, synthetic construct
  source 1..50: mol_type = other DNA
ggccagtttttcccgctatggcatttcctattcctcatacaaaaaatcat

SEQ ID NO: 59211 - DNA, 50 bp, synthetic construct
  source 1..50: mol_type = other DNA
acggcaagctcggcgcgccgatcagccgtgatccgcgtcgccctttacgc

SEQ ID NO: 59212 - DNA, 50 bp, synthetic construct
  source 1..50: mol_type = other DNA
ttaaaagcttttacactactttatagataaattagggttggagctttctg

SEQ ID NO: 59213 - DNA, 50 bp, synthetic construct
  source 1..50: mol_type = other DNA
aggtcataatagatttcatcattataaggagatgatataatgcttgaccc

SEQ ID NO: 59214 - DNA, 50 bp, synthetic construct
  source 1..50: mol_type = other DNA
acaaaccaaaataaatgtaaaataaaattttgttcattattttctgttgg

SEQ ID NO: 59215 - DNA, 50 bp, synthetic construct
  source 1..50: mol_type = other DNA
gatttactcgaagaatttacaaaaattggtgtagattaaactttgttaag

SEQ ID NO: 59216 - DNA, 50 bp, synthetic construct
  source 1..50: mol_type = other DNA
aaaaccttcaagagtccatccttaattcattttggtctccttttattttc

SEQ ID NO: 59217 - DNA, 50 bp, synthetic construct
  source 1..50: mol_type = other DNA
aaacgtacaaaatatttatattacctaaaatatgagtatgtttttcattg

SEQ ID NO: 59218 - DNA, 50 bp, synthetic construct
  source 1..50: mol_type = other DNA
cgaccatcagcgggatcgcgagcaagcctccgctacttcctgatcggtcc

SEQ ID NO: 59219 - DNA, 50 bp, synthetic construct
  source 1..50: mol_type = other DNA
ctgcaaggttaaatcttacaggtattaacctgtaatttttagggtaggtc

SEQ ID NO: 59220 - DNA, 50 bp, synthetic construct
  source 1..50: mol_type = other DNA
attagtgtattgaaccacaatatcaagaagtgctgcatgaatccactact

SEQ ID NO: 59221 - DNA, 50 bp, synthetic construct
  source 1..50: mol_type = other DNA
tcgtttgaagattccggggcggcagcgtgtacggcggcggtttcattgaa

SEQ ID NO: 59222 - DNA, 50 bp, synthetic construct
  source 1..50: mol_type = other DNA
aacatcactgataatgatattaatcccgcaaaatggcaatcaggcctgtt

SEQ ID NO: 59223 - DNA, 50 bp, synthetic construct
  source 1..50: mol_type = other DNA
cctgtggggcgcggtgccgtcgattaacgcctattggcgaaactccaaga

SEQ ID NO: 59224 - DNA, 50 bp, synthetic construct
  source 1..50: mol_type = other DNA
ggccacgtaagccatgccaacagttaacagttgccagagcctactccgct

SEQ ID NO: 59225 - DNA, 50 bp, synthetic construct
  source 1..50: mol_type = other DNA
tgcacctccttctttgagttgaaatacacatcctccataaaggtgccgca

SEQ ID NO: 59226 - DNA, 50 bp, synthetic construct
  source 1..50: mol_type = other DNA
agagatgttttcgactttgaaggatgttcttcatggtcggtcgaaactct

SEQ ID NO: 59227 - DNA, 50 bp, synthetic construct
  source 1..50: mol_type = other DNA
gtaaaaaggctaaaaaagcaggagagctgatttttttttatgcttagagc

SEQ ID NO: 59228 - DNA, 50 bp, synthetic construct
  source 1..50: mol_type = other DNA
taggccgccattcggattttctgaatgtagaaaattccgatgctccctta

SEQ ID NO: 59229 - DNA, 50 bp, synthetic construct
  source 1..50: mol_type = other DNA
cgtttatcactttcaggaacaagggtgtttgttcctgaaattccctcatc

SEQ ID NO: 59230 - DNA, 50 bp, synthetic construct
  source 1..50: mol_type = other DNA
tatggtcggttactacagtttaatacgctacattttgtagagtgtcaata

SEQ ID NO: 59231 - DNA, 50 bp, synthetic construct
  source 1..50: mol_type = other DNA
tttaaggctggggtgctttttggtattcgaacaagtaattataacttaaa

SEQ ID NO: 59232 - DNA, 50 bp, synthetic construct
  source 1..50: mol_type = other DNA
gaatattatcagaatatgggctttaagcatcccaatcaagcatatattat

SEQ ID NO: 59233 - DNA, 50 bp, synthetic construct
  source 1..50: mol_type = other DNA
tattcaagaagccagcataacaccagcctgttatgctcttaagtagataa

SEQ ID NO: 59234 - DNA, 50 bp, synthetic construct
  source 1..50: mol_type = other DNA
ttaatactgtcctaaattttggatttatcaaaaagggggtacaaaagcaa

SEQ ID NO: 59235 - DNA, 50 bp, synthetic construct
  source 1..50: mol_type = other DNA
ttgattaacgacctaaaaaaagaaaataccattttgaaaatattttgaaa

SEQ ID NO: 59236 - DNA, 50 bp, synthetic construct
  source 1..50: mol_type = other DNA
gcagccggaacggcaggttattgaattcaccaaccaccccagatcagcca

SEQ ID NO: 59237 - DNA, 50 bp, synthetic construct
  source 1..50: mol_type = other DNA
gggttaacctacgaagaactatctgccagcggttccgctgtccgggctct

SEQ ID NO: 59238 - DNA, 50 bp, synthetic construct
  source 1..50: mol_type = other DNA
gaatgctgaagatgaactgcatgtttaaacgcaattcatctcatacatga

SEQ ID NO: 59239 - DNA, 50 bp, synthetic construct
  source 1..50: mol_type = other DNA
tgggaaaacaaaggtcgcaacaaaactttttcaattttctttttttacca

SEQ ID NO: 59240 - DNA, 50 bp, synthetic construct
  source 1..50: mol_type = other DNA
tgcgcttcgccgtaggcttcatatcacgaccgcgccctgctggaagccct

SEQ ID NO: 59241 - DNA, 50 bp, synthetic construct
  source 1..50: mol_type = other DNA
catagggaggaagtcccatcggttcgagattagggggttcaaatcccctc

SEQ ID NO: 59242 - DNA, 50 bp, synthetic construct
  source 1..50: mol_type = other DNA
ttctctaacacaactaaaggctcaaaatagaatttatatatgttagagaa

SEQ ID NO: 59243 - DNA, 50 bp, synthetic construct
  source 1..50: mol_type = other DNA
ggcaacaattgattacctccataatattgaaaaaattggtttatgttagt

SEQ ID NO: 59244 - DNA, 50 bp, synthetic construct
  source 1..50: mol_type = other DNA
cggagcggaaggtgaagtcctccttggtgagctcttggccctccgggaag

SEQ ID NO: 59245 - DNA, 50 bp, synthetic construct
  source 1..50: mol_type = other DNA
tactccagaagctctctacgcggcggagagcgtcgagacgttccagtaca

SEQ ID NO: 59246 - DNA, 50 bp, synthetic construct
  source 1..50: mol_type = other DNA
tcagtctacatacggtgttgtccacgcggagaacattatgaaaagggcta

SEQ ID NO: 59247 - DNA, 50 bp, synthetic construct
  source 1..50: mol_type = other DNA
gccaaacagacccataaccacaagggcttctggtagtcggtcggttattc

SEQ ID NO: 59248 - DNA, 50 bp, synthetic construct
  source 1..50: mol_type = other DNA
agaaccaggtaaattattacaccaaaatcagtattaatttagctactctc

SEQ ID NO: 59249 - DNA, 50 bp, synthetic construct
  source 1..50: mol_type = other DNA
agtaatagtgatgtaaggtatgagtttttaaaatttacaattctatataa

SEQ ID NO: 59250 - DNA, 50 bp, synthetic construct
  source 1..50: mol_type = other DNA
tgtttatcgtttttttctgttgttaatacactcaaaaagaatagctaagt

SEQ ID NO: 59251 - DNA, 50 bp, synthetic construct
  source 1..50: mol_type = other DNA
ggcttttgggtcatgcaaccagtgatcgggttcgccatgatcgcatggat

SEQ ID NO: 59252 - DNA, 50 bp, synthetic construct
  source 1..50: mol_type = other DNA
aatgggttcaccattctaatggttctgataattagcttgactaaggagaa

SEQ ID NO: 59253 - DNA, 50 bp, synthetic construct
  source 1..50: mol_type = other DNA
agagcaaacaatggtctgctctaaatttgaatcaaaatgggctttttcaa

SEQ ID NO: 59254 - DNA, 50 bp, synthetic construct
  source 1..50: mol_type = other DNA
cggcctgcgcgcgcggcgggatcggccatgttcacagcgcgcgcccaccg

SEQ ID NO: 59255 - DNA, 50 bp, synthetic construct
  source 1..50: mol_type = other DNA
cgccagcatcatcgtcagcccgcgccgacaggaggacgctcgtgcgaacg

SEQ ID NO: 59256 - DNA, 50 bp, synthetic construct
  source 1..50: mol_type = other DNA
gaatcgtttctaaaaagtcttcaatattatcaaagctttagcaataatat

SEQ ID NO: 59257 - DNA, 50 bp, synthetic construct
  source 1..50: mol_type = other DNA
ttcttctcattttaaattattttgtaaagaatcctttaactcgtccctaa

SEQ ID NO: 59258 - DNA, 50 bp, synthetic construct
  source 1..50: mol_type = other DNA
atatttattagaaatcaataaatttaaagcagtagcgtgctattaaatag

SEQ ID NO: 59259 - DNA, 50 bp, synthetic construct
  source 1..50: mol_type = other DNA
tgataaatagaaaagtaggcatcaaatgataaccccttttctgattcggt

SEQ ID NO: 59260 - DNA, 50 bp, synthetic construct
  source 1..50: mol_type = other DNA
gaccagagaatgccgagactgcctcgaggttggatacagcttcttcaatc

SEQ ID NO: 59261 - DNA, 50 bp, synthetic construct
  source 1..50: mol_type = other DNA
cttgaagatcgccggcgagggcggcgccggatatgccggcgtcctcgaag

SEQ ID NO: 59262 - DNA, 50 bp, synthetic construct
  source 1..50: mol_type = other DNA
acatcaatttttaatgcaaaaaactagtccatccttgcaatttaccgctc

SEQ ID NO: 59263 - DNA, 50 bp, synthetic construct
  source 1..50: mol_type = other DNA
tgcctatgccgaggaaaccaaccggccggatggataaggtagcttaggag

SEQ ID NO: 59264 - DNA, 50 bp, synthetic construct
  source 1..50: mol_type = other DNA
aaaagagtacaaaaataacacctattgaaagtatatttttgttttcgcgg

SEQ ID NO: 59265 - DNA, 50 bp, synthetic construct
  source 1..50: mol_type = other DNA
atcgtaaccactcccacaggcgttgggggaaaagtgggagtgagaaaaat

SEQ ID NO: 59266 - DNA, 50 bp, synthetic construct
  source 1..50: mol_type = other DNA
ccttcacaaaggtgtcggtcagagcgctgttgccgagaaaacctgcaaag

SEQ ID NO: 59267 - DNA, 50 bp, synthetic construct
  source 1..50: mol_type = other DNA
ggttcgtgatatagttgcggatgcggaaatgcgctatgataagcacaacg

SEQ ID NO: 59268 - DNA, 50 bp, synthetic construct
  source 1..50: mol_type = other DNA
gatcctgttatccagcgatttcggcgccgaaatctcactgtccagggagc

SEQ ID NO: 59269 - DNA, 50 bp, synthetic construct
  source 1..50: mol_type = other DNA
cagaactgccggggcgagagggcttcgggacgctcggtgtagcggacctt

SEQ ID NO: 59270 - DNA, 50 bp, synthetic construct
  source 1..50: mol_type = other DNA
taagtaaatgtaattatttgttacagttatcaaagcagagcgcagaccca

SEQ ID NO: 59271 - DNA, 50 bp, synthetic construct
  source 1..50: mol_type = other DNA
tgtttgtagcttttctggctctgatggcagcgacaaaaaagcactacacg

SEQ ID NO: 59272 - DNA, 50 bp, synthetic construct
  source 1..50: mol_type = other DNA
gaaaaccccgctttccattgggacatgtccggccggtccgcggggagcag

SEQ ID NO: 59273 - DNA, 50 bp, synthetic construct
  source 1..50: mol_type = other DNA
aaagtagatatctgcgcatctgcggcctacgctgctgcgtcaacttctta

SEQ ID NO: 59274 - DNA, 50 bp, synthetic construct
  source 1..50: mol_type = other DNA
tatagacaaggaaactgagggcgattcatgaaacgcgttttgtgtctgta

SEQ ID NO: 59275 - DNA, 50 bp, synthetic construct
  source 1..50: mol_type = other DNA
aatccatagcggggtcttgtattgtacaagcaaaagtccccaggttcaaa

SEQ ID NO: 59276 - DNA, 50 bp, synthetic construct
  source 1..50: mol_type = other DNA
gctctcatcaaggaggaggtcgaggactggaccgcctcatcgagtttatg

SEQ ID NO: 59277 - DNA, 50 bp, synthetic construct
  source 1..50: mol_type = other DNA
ctgcctcccgctgctcctccagagaattctggatcagattctggaggctg

SEQ ID NO: 59278 - DNA, 50 bp, synthetic construct
  source 1..50: mol_type = other DNA
ttatattgcgggcggaaccccaccatagtgaggtttagagcgtaataaaa

SEQ ID NO: 59279 - DNA, 50 bp, synthetic construct
  source 1..50: mol_type = other DNA
atccgaaatatttttgcaaggtctccggtgcttacggcaatattgccgat

SEQ ID NO: 59280 - DNA, 50 bp, synthetic construct
  source 1..50: mol_type = other DNA
aacggaactaccctatgtggaagagctctcttatttgtgccgccgccctt

SEQ ID NO: 59281 - DNA, 50 bp, synthetic construct
  source 1..50: mol_type = other DNA
gtttattgaagtaaatgacgctgatatatcactcaactcggccatgaaac

SEQ ID NO: 59282 - DNA, 50 bp, synthetic construct
  source 1..50: mol_type = other DNA
ccagcgcagcgactttgcatccgtagagggatgcactagttatgagtggt

SEQ ID NO: 59283 - DNA, 50 bp, synthetic construct
  source 1..50: mol_type = other DNA
gttatacgctggaaaatttgataaatttattatttttcgtttaaatagac

SEQ ID NO: 59284 - DNA, 50 bp, synthetic construct
  source 1..50: mol_type = other DNA
tttaacaggtgttaattgtgggtaaactactacaaagtacattggtaaag

SEQ ID NO: 59285 - DNA, 50 bp, synthetic construct
  source 1..50: mol_type = other DNA
caagctgcttttttcatatcacgttaacatgataaaaaaggaactttctt

SEQ ID NO: 59286 - DNA, 50 bp, synthetic construct
  source 1..50: mol_type = other DNA
aagatgaaaaattcatttctctatgcatagaaaaatgacctcaccagtcg

SEQ ID NO: 59287 - DNA, 50 bp, synthetic construct
  source 1..50: mol_type = other DNA
gtttggcacatgagttgctttcaaagcatcggtgtacaaggggtacaaac

SEQ ID NO: 59288 - DNA, 50 bp, synthetic construct
  source 1..50: mol_type = other DNA
gtgaaaaagcgtgtggccgcctacgcattctggtcagtacgcttttaagc

SEQ ID NO: 59289 - DNA, 50 bp, synthetic construct
  source 1..50: mol_type = other DNA
gcgacaccctctggggcattgccgagacgctatgcaaagacaggtaacta

SEQ ID NO: 59290 - DNA, 50 bp, synthetic construct
  source 1..50: mol_type = other DNA
ttcaaaacccctgtgggtcatagggaactagaagccctcggaatgtggaa

SEQ ID NO: 59291 - DNA, 50 bp, synthetic construct
  source 1..50: mol_type = other DNA
gttttgatatccgattttttaacatttgtgaaaaaaaatgccgtcagaaa

SEQ ID NO: 59292 - DNA, 50 bp, synthetic construct
  source 1..50: mol_type = other DNA
tgggaaatcttgtccgaaaaggtatctaatttgacggacaacattatatt

SEQ ID NO: 59293 - DNA, 50 bp, synthetic construct
  source 1..50: mol_type = other DNA
gcggcgttgattccagcaatcaggtgcgtgatgggctgaatggtgggcgg

SEQ ID NO: 59294 - DNA, 50 bp, synthetic construct
  source 1..50: mol_type = other DNA
agtaaaagaagagttgcaggatatgctagaccaggaacaatgcttattaa

SEQ ID NO: 59295 - DNA, 50 bp, synthetic construct
  source 1..50: mol_type = other DNA
attagagaagatattgatgttaaaaagcagactgcaatttcttaagtaaa

SEQ ID NO: 59296 - DNA, 50 bp, synthetic construct
  source 1..50: mol_type = other DNA
cagggaaaaatggcatacaagctgaaattcttgtaagcggatttattgtg

SEQ ID NO: 59297 - DNA, 50 bp, synthetic construct
  source 1..50: mol_type = other DNA
cgtagagtttacagcttccgcaaggatttaattaagagtgcaatgcgcat

SEQ ID NO: 59298 - DNA, 50 bp, synthetic construct
  source 1..50: mol_type = other DNA
cacgccatagacaccaggcacagagctccgtcatctttgcgatgatcgtg

SEQ ID NO: 59299 - DNA, 50 bp, synthetic construct
  source 1..50: mol_type = other DNA
gtgaccgtcagctccatccttcccaggggaatttggatggtacatccaac

SEQ ID NO: 59300 - DNA, 50 bp, synthetic construct
  source 1..50: mol_type = other DNA
tcgcaagtttttataataaaaaaaagccttgagtatatatcaatttacga

SEQ ID NO: 59301 - DNA, 50 bp, synthetic construct
  source 1..50: mol_type = other DNA
catcgcgtttcgccaagacggagcgctctccgccgtggcgaaggccgtca

SEQ ID NO: 59302 - DNA, 50 bp, synthetic construct
  source 1..50: mol_type = other DNA
tcctgtcgtaacgaactgcagcctcgagcaccttcctggtgcgattgaac

SEQ ID NO: 59303 - DNA, 50 bp, synthetic construct
  source 1..50: mol_type = other DNA
aaaggaaggtaccaggaaggggggagttgttttaaccgatatcttgatta

SEQ ID NO: 59304 - DNA, 50 bp, synthetic construct
  source 1..50: mol_type = other DNA
atatatcagctatggtctcgttgagatcaaacatgccaacaataagagtt

SEQ ID NO: 59305 - DNA, 50 bp, synthetic construct
  source 1..50: mol_type = other DNA
gagatggataaggtactcctacagatctgtttgaaatgcatttctctcaa

SEQ ID NO: 59306 - DNA, 50 bp, synthetic construct
  source 1..50: mol_type = other DNA
tcttggcgacgctgctccccaaggggcaacgcggcgcaggctcgcaaccg

SEQ ID NO: 59307 - DNA, 50 bp, synthetic construct
  source 1..50: mol_type = other DNA
tttttatgctcaaatcaagaattttaaaacgctctataatttccataaaa

SEQ ID NO: 59308 - DNA, 50 bp, synthetic construct
  source 1..50: mol_type = other DNA
agtgatgaggagatggatttcattgtaataaagaactgattggggtcata

SEQ ID NO: 59309 - DNA, 50 bp, synthetic construct
  source 1..50: mol_type = other DNA
aataaaaaaccgcatcacttatgatatcggttaatgatgcggtttttata

SEQ ID NO: 59310 - DNA, 50 bp, synthetic construct
  source 1..50: mol_type = other DNA
tttagcaatatcactaacaaggggaaaaataggttgtgtataacaaaaaa

SEQ ID NO: 59311 - DNA, 50 bp, synthetic construct
  source 1..50: mol_type = other DNA
aaacgctactaaagaggatatggaaatccatctcctcatcactgcggttt

SEQ ID NO: 59312 - DNA, 50 bp, synthetic construct
  source 1..50: mol_type = other DNA
tctcaaattgctatgtgcttcttatttaagagtaacaataacacacgtta

SEQ ID NO: 59313 - DNA, 50 bp, synthetic construct
  source 1..50: mol_type = other DNA
tatgcttatcgacatcgagtttggacgcactccacatggctggtattatc

SEQ ID NO: 59314 - DNA, 50 bp, synthetic construct
  source 1..50: mol_type = other DNA
tttcctaaaaaatgataaaatgggtaccctctgtctcagcaattccccaa

SEQ ID NO: 59315 - DNA, 50 bp, synthetic construct
  source 1..50: mol_type = other DNA
ctttttatgtattcatttcgggctatattacacctctttttcataaagag

SEQ ID NO: 59316 - DNA, 50 bp, synthetic construct
  source 1..50: mol_type = other DNA
tccactggaccttttgactcccgcagcgttgatacaaaagatgtaaatat

SEQ ID NO: 59317 - DNA, 50 bp, synthetic construct
  source 1..50: mol_type = other DNA
gtccactggaccttttgactcccgcacttttgtccaaactcgatgtcgat

SEQ ID NO: 59318 - DNA, 50 bp, synthetic construct
  source 1..50: mol_type = other DNA
aatcaggttcggtattatcgagaatatcgcttctatattcgaaaatgaaa

SEQ ID NO: 59319 - DNA, 50 bp, synthetic construct
  source 1..50: mol_type = other DNA
ttttttattttaaaattttttaatttcttaaaaaaattttttgaaaaaat

SEQ ID NO: 59320 - DNA, 50 bp, synthetic construct
  source 1..50: mol_type = other DNA
tttatgtattcatttccggctattcaagtagctagtcttgaataccgaaa

SEQ ID NO: 59321 - DNA, 50 bp, synthetic construct
  source 1..50: mol_type = other DNA
tccactggaccttttgactcccgcagcgttgatacaaagagtgaaatcgt

SEQ ID NO: 59322 - DNA, 50 bp, synthetic construct
  source 1..50: mol_type = other DNA
aaaggtaaagagaagggaataattataaataatcctaatgtgatacataa

SEQ ID NO: 59323 - DNA, 50 bp, synthetic construct
  source 1..50: mol_type = other DNA
atccctcctttcaatttcaactatataaatataaaattgtatatgaggtg

SEQ ID NO: 59324 - DNA, 50 bp, synthetic construct
  source 1..50: mol_type = other DNA
tatattattttaggtgaggtaataagaaacttgatgtgcaaaatgctatc

SEQ ID NO: 59325 - DNA, 50 bp, synthetic construct
  source 1..50: mol_type = other DNA
ttcaatccctaagtgaacgcttctttaggagcggtcagatagggattatt

SEQ ID NO: 59326 - DNA, 50 bp, synthetic construct
  source 1..50: mol_type = other DNA
cagttatcgatgaagaaaaagctgaagtcctttttcttcatgtctctatc

SEQ ID NO: 59327 - DNA, 50 bp, synthetic construct
  source 1..50: mol_type = other DNA
aaataattatttgaaaaataaaaagttttccataggacaaataattcaga

SEQ ID NO: 59328 - DNA, 50 bp, synthetic construct
  source 1..50: mol_type = other DNA
atcagatcttaatattgaatatattaaaaaattatattggtggattaatt

SEQ ID NO: 59329 - DNA, 50 bp, synthetic construct
  source 1..50: mol_type = other DNA
agaaaagcaactttatttaaaatcactaattaaagcctccgggcttttct

SEQ ID NO: 59330 - DNA, 50 bp, synthetic construct
  source 1..50: mol_type = other DNA
acttttttacgaataatttaatgatttcagcctctttttcgttaataaca

SEQ ID NO: 59331 - DNA, 50 bp, synthetic construct
  source 1..50: mol_type = other DNA
ctaagctcaaataaaattcatctctattatattattttattttttctctt

SEQ ID NO: 59332 - DNA, 50 bp, synthetic construct
  source 1..50: mol_type = other DNA
agggtacatccctgccaactaaaccagtacaaccgttcatcatctaccct

SEQ ID NO: 59333 - DNA, 50 bp, synthetic construct
  source 1..50: mol_type = other DNA
gggcctgaaatgaaagagtacacgctcgactcaagtttcattatttcttc

SEQ ID NO: 59334 - DNA, 50 bp, synthetic construct
  source 1..50: mol_type = other DNA
gtatggatcttcatatttttgcaccatcttcaattgttggcgattcaata

SEQ ID NO: 59335 - DNA, 50 bp, synthetic construct
  source 1..50: mol_type = other DNA
acacactcatgcacaatagtattattcaattctatatccatagggtgtgt

SEQ ID NO: 59336 - DNA, 50 bp, synthetic construct
  source 1..50: mol_type = other DNA
aagccgccgagttcgactgcttccccagaagaggaagcgtcgaactcttc

SEQ ID NO: 59337 - DNA, 50 bp, synthetic construct
  source 1..50: mol_type = other DNA
cgtgtttcgatgggtgtataatattaagtgtgtcaacccattaatactaa

SEQ ID NO: 59338 - DNA, 50 bp, synthetic construct
  source 1..50: mol_type = other DNA
atcaaactgtatgcatattccgcctgctcaattactttttttactttaag

SEQ ID NO: 59339 - DNA, 50 bp, synthetic construct
  source 1..50: mol_type = other DNA
atatcaagtcatttatgacattatctttaagtgcagtttgtccttgatat

SEQ ID NO: 59340 - DNA, 50 bp, synthetic construct
  source 1..50: mol_type = other DNA
ttgcacaaagtatacaggattgcagctgcaaaatagtattgactggtcat

SEQ ID NO: 59341 - DNA, 50 bp, synthetic construct
  source 1..50: mol_type = other DNA
tagggtgttttgcaaaaatgttgtgaccagcctttcagtaaatgacacgc

SEQ ID NO: 59342 - DNA, 50 bp, synthetic construct
  source 1..50: mol_type = other DNA
aacatcctgctcgatgatctggacacgaccaattcttcgaggcctggcgg

SEQ ID NO: 59343 - DNA, 50 bp, synthetic construct
  source 1..50: mol_type = other DNA
ccacttgttttacacgtcttgtctctggacgaggcatgtaaaacaggtgg

SEQ ID NO: 59344 - DNA, 50 bp, synthetic construct
  source 1..50: mol_type = other DNA
gatagtttgcaccccaccgggccgcgttttgtcaagtgctttttcgtatt

SEQ ID NO: 59345 - DNA, 50 bp, synthetic construct
  source 1..50: mol_type = other DNA
cggaaaatgcaccgctgaggtcacaagcattttcaaaagtgctttttcct

SEQ ID NO: 59346 - DNA, 50 bp, synthetic construct
  source 1..50: mol_type = other DNA
ataatataccgaatcaagttgtattttcgagcctcctttgtagttgttaa

SEQ ID NO: 59347 - DNA, 50 bp, synthetic construct
  source 1..50: mol_type = other DNA
cgatagttggcgtttctcattctcgcgataatgagagcagccatttatgt

SEQ ID NO: 59348 - DNA, 50 bp, synthetic construct
  source 1..50: mol_type = other DNA
ggaaaatttgtttacaaaatatccattcttattttaagaaagaatgagaa

SEQ ID NO: 59349 - DNA, 50 bp, synthetic construct
  source 1..50: mol_type = other DNA
tggaatttatattaattatttttcataacttttaattacatttaataaca

SEQ ID NO: 59350 - DNA, 50 bp, synthetic construct
  source 1..50: mol_type = other DNA
tagcattttagttgttttttcataggaacttgagacttcttaaaatccta

SEQ ID NO: 59351 - DNA, 50 bp, synthetic construct
  source 1..50: mol_type = other DNA
atgtaagtaaatctccatatccaagtttgcgtactgtcatctgtactaat

SEQ ID NO: 59352 - DNA, 50 bp, synthetic construct
  source 1..50: mol_type = other DNA
tctttcatcaatcgattgaactcatcccttacaaaatctttaaaaccata

SEQ ID NO: 59353 - DNA, 50 bp, synthetic construct
  source 1..50: mol_type = other DNA
aaattatttgatctaacttcttgagtatttattgttattgaaaatcatgc

SEQ ID NO: 59354 - DNA, 50 bp, synthetic construct
  source 1..50: mol_type = other DNA
ctgtgttcatcgcctgaagcatatcaagccctttgccgaagctcccccta

SEQ ID NO: 59355 - DNA, 50 bp, synthetic construct
  source 1..50: mol_type = other DNA
tacaataaccataagctaacattattaaaaagaagtggtagaaatttctt

SEQ ID NO: 59356 - DNA, 50 bp, synthetic construct
  source 1..50: mol_type = other DNA
ataaacagaaaaaagggtagatgatgggatgtaaccaaatttaattatat

SEQ ID NO: 59357 - DNA, 50 bp, synthetic construct
  source 1..50: mol_type = other DNA
gtttactgtaatcattgcggtgctagggtaaggcaatggaaagtcacaaa

SEQ ID NO: 59358 - DNA, 50 bp, synthetic construct
  source 1..50: mol_type = other DNA
attgaatttaagtagaaaggggtcataaaaataatctaatcaaaatcaaa

SEQ ID NO: 59359 - DNA, 50 bp, synthetic construct
  source 1..50: mol_type = other DNA
gtgtacacccggtctcccgcgccaccaggcgcaggaaaccgggatggggc

SEQ ID NO: 59360 - DNA, 50 bp, synthetic construct
  source 1..50: mol_type = other DNA
tatttatcaagtcttatagcattaattttaattttaaaaactgtttgtca

SEQ ID NO: 59361 - DNA, 50 bp, synthetic construct
  source 1..50: mol_type = other DNA
aactatttttattatagcactcttttatagctgcaataataaaaacaata

SEQ ID NO: 59362 - DNA, 50 bp, synthetic construct
  source 1..50: mol_type = other DNA
aaagaattaagaagtacatatttcacgaaatattatttaatacattcttt

SEQ ID NO: 59363 - DNA, 50 bp, synthetic construct
  source 1..50: mol_type = other DNA
cgcaggaacttaagcggttctcttacaagagaattatatcatttccgtta

SEQ ID NO: 59364 - DNA, 50 bp, synthetic construct
  source 1..50: mol_type = other DNA
tccgtaaaataaaagccaagcctggccagacctggactagactttaactc

SEQ ID NO: 59365 - DNA, 50 bp, synthetic construct
  source 1..50: mol_type = other DNA
ttggttcatattatgtaaaaaaaggtatttcttttataatggaccgccag

SEQ ID NO: 59366 - DNA, 50 bp, synthetic construct
  source 1..50: mol_type = other DNA
ccgcccggcgagtgcgagacatgttcgggcgttgcgccctcgcggggcga

SEQ ID NO: 59367 - DNA, 50 bp, synthetic construct
  source 1..50: mol_type = other DNA
ctgccaatatccggcagatatgcgaatggattgatgcaggcatatgagca

SEQ ID NO: 59368 - DNA, 50 bp, synthetic construct
  source 1..50: mol_type = other DNA
aaattgatgtggaaacataatggaataaggttatgattcctaaaaaaaca

SEQ ID NO: 59369 - DNA, 50 bp, synthetic construct
  source 1..50: mol_type = other DNA
aatgaaattattcagcaaataaaagataccattagacgaatagcgaaaaa

SEQ ID NO: 59370 - DNA, 50 bp, synthetic construct
  source 1..50: mol_type = other DNA
gtgtgagaatgcactctaccattggagagcaggggatggtattctcacat

SEQ ID NO: 59371 - DNA, 50 bp, synthetic construct
  source 1..50: mol_type = other DNA
aatctgatatggcagtgtcataagcatttgttacactcccatgcaatcta

SEQ ID NO: 59372 - DNA, 50 bp, synthetic construct
  source 1..50: mol_type = other DNA
cgccaggaacaggtattcactggtgtcgaggtccaggaaaatttctggga

SEQ ID NO: 59373 - DNA, 50 bp, synthetic construct
  source 1..50: mol_type = other DNA
ttgaatggattataccgaattgcagctgcaatttcgtagagtatatgatg

SEQ ID NO: 59374 - DNA, 50 bp, synthetic construct
  source 1..50: mol_type = other DNA
agatggagcgtttcttttgaacaaccaatgctaacagtaacgctggtcga

SEQ ID NO: 59375 - DNA, 50 bp, synthetic construct
  source 1..50: mol_type = other DNA
tgtagatagcactacaatagcagacactaaagaacaaaaagcctcttaca

SEQ ID NO: 59376 - DNA, 50 bp, synthetic construct
  source 1..50: mol_type = other DNA
aacccgaatagcctatattcaagggtcattgtatttgagctattcggcga

SEQ ID NO: 59377 - DNA, 50 bp, synthetic construct
  source 1..50: mol_type = other DNA
tgtagttaaaacttagtagaatgaaccgaatctaataagttttatcctta

SEQ ID NO: 59378 - DNA, 50 bp, synthetic construct
  source 1..50: mol_type = other DNA
attggtcgaaagtctctcgaacgtcaacgttgtaacgacaatcgacaatc

SEQ ID NO: 59379 - DNA, 50 bp, synthetic construct
  source 1..50: mol_type = other DNA
gttatcacttttgataacgattttttaaaaggcgtagaagcagtgataac

SEQ ID NO: 59380 - DNA, 50 bp, synthetic construct
  source 1..50: mol_type = other DNA
cggttcccgctttcatcacaaagtgggacgagtatgggaactgggaactg

SEQ ID NO: 59381 - DNA, 50 bp, synthetic construct
  source 1..50: mol_type = other DNA
ataaacaaggttaaggtgacagatgatgtcttttcttgtacccattttat

SEQ ID NO: 59382 - DNA, 50 bp, synthetic construct
  source 1..50: mol_type = other DNA
cagatctttggaacagttccaagaacaagaaaaacttttcaaaagatatt

SEQ ID NO: 59383 - DNA, 50 bp, synthetic construct
  source 1..50: mol_type = other DNA
cgacatcaagtttggacaataatgctcatcattgtccaaacttatattta

SEQ ID NO: 59384 - DNA, 50 bp, synthetic construct
  source 1..50: mol_type = other DNA
cctatactagtaccaacacatatcgactattgtgttgatacaacgagcag

SEQ ID NO: 59385 - DNA, 50 bp, synthetic construct
  source 1..50: mol_type = other DNA
gttatcaattggaaaatataaataattctcactcttttctatctcataca

SEQ ID NO: 59386 - DNA, 50 bp, synthetic construct
  source 1..50: mol_type = other DNA
ataaaaacatatgttcggtggtgagggtaacaccaattaagtgtttagtt

SEQ ID NO: 59387 - DNA, 50 bp, synthetic construct
  source 1..50: mol_type = other DNA
gctcgttgtagcaacacaatagtctcggctttagtatcggaacacagact

SEQ ID NO: 59388 - DNA, 50 bp, synthetic construct
  source 1..50: mol_type = other DNA
taaaaagatacaagaaaatttagcagagagcctccaggcttttctttttt

SEQ ID NO: 59389 - DNA, 50 bp, synthetic construct
  source 1..50: mol_type = other DNA
tgttatgactgctattaatagactgcttgctattaatagcttttagagtg

SEQ ID NO: 59390 - DNA, 50 bp, synthetic construct
  source 1..50: mol_type = other DNA
ctcaggagtagagttgtgggcttttctaagcatcaattatgcctcctgca

SEQ ID NO: 59391 - DNA, 50 bp, synthetic construct
  source 1..50: mol_type = other DNA
atagtattaatttcttgcgtgatacctactaaatttgaaattagaaagat

SEQ ID NO: 59392 - DNA, 50 bp, synthetic construct
  source 1..50: mol_type = other DNA
aatcaaaaaaacttctaagacgtataggcggcttatgagtgacgcctatt

SEQ ID NO: 59393 - DNA, 50 bp, synthetic construct
  source 1..50: mol_type = other DNA
gcgcgcatcccctcggcgatccgccgcgcggcggccgaggtgctgcacga

SEQ ID NO: 59394 - DNA, 50 bp, synthetic construct
  source 1..50: mol_type = other DNA
ttgcgcggatgcgcgtagtactgcgcgtgcagctgcggctcgccgagcac

SEQ ID NO: 59395 - DNA, 50 bp, synthetic construct
  source 1..50: mol_type = other DNA
tgatgactaccttcatcataaccctttatgtgtcatttttgtacctgctt

SEQ ID NO: 59396 - DNA, 50 bp, synthetic construct
  source 1..50: mol_type = other DNA
aataaccttttagtatacttcttacatgacaaatatataaaaaggttatt

SEQ ID NO: 59397 - DNA, 50 bp, synthetic construct
  source 1..50: mol_type = other DNA
cgtataggtatagtatcgctcgggtgcccgaaagatgctagaaatataca

SEQ ID NO: 59398 - DNA, 50 bp, synthetic construct
  source 1..50: mol_type = other DNA
ataatcaggataaatttgcttccaatattaagcgtttagagtgatatata

SEQ ID NO: 59399 - DNA, 50 bp, synthetic construct
  source 1..50: mol_type = other DNA
ttaaggttgttgataacacatcaaatttgaaagcgtaaaaactgccttag

SEQ ID NO: 59400 - DNA, 50 bp, synthetic construct
  source 1..50: mol_type = other DNA
taacattttttaatcagacaagcgtagaattaatagatgaagaaaagtgg

SEQ ID NO: 59401 - DNA, 50 bp, synthetic construct
  source 1..50: mol_type = other DNA
ctgctgctgctcgccgtacccctcgggagggggcatttttgcgttaggcc

SEQ ID NO: 59402 - DNA, 50 bp, synthetic construct
  source 1..50: mol_type = other DNA
gacgagatcgtcagccgacaggtggccagcggcgcgccggcgaggccctg

SEQ ID NO: 59403 - DNA, 50 bp, synthetic construct
  source 1..50: mol_type = other DNA
gccgccatcacccgctgccggcccgcggaccgacggtctgtcggggcggt

SEQ ID NO: 59404 - DNA, 50 bp, synthetic construct
  source 1..50: mol_type = other DNA
ctcgcggcgtccctcgcgccgcaaccttgcgccgagaggtggccgacgca

SEQ ID NO: 59405 - DNA, 50 bp, synthetic construct
  source 1..50: mol_type = other DNA
cgcatcgtgccggccgagctgttcgcgatgattatgcccgccaccttgcg

SEQ ID NO: 59406 - DNA, 50 bp, synthetic construct
  source 1..50: mol_type = other DNA
agctgaataagataaaattaatccgcggtagatcggcgtctttcaggccg

SEQ ID NO: 59407 - DNA, 50 bp, synthetic construct
  source 1..50: mol_type = other DNA
tgccgattggctaatcggacgagtggtctccagcgtggtgacgatcggct

SEQ ID NO: 59408 - DNA, 50 bp, synthetic construct
  source 1..50: mol_type = other DNA
ccgccttgctagcggtagtcagtgcggcggcacgcaggccggcaagacga

SEQ ID NO: 59409 - DNA, 50 bp, synthetic construct
  source 1..50: mol_type = other DNA
tgaatcctccttcccgcgcctatcggccgaggagccggaaggaggcttcc

SEQ ID NO: 59410 - DNA, 50 bp, synthetic construct
  source 1..50: mol_type = other DNA
aagaactcgaccagcttcattattaagaggctaaagctggtatcaagatt

SEQ ID NO: 59411 - DNA, 50 bp, synthetic construct
  source 1..50: mol_type = other DNA
cgcatccgtcatgtcttccatccaccggcaacgcggacatggtggtggcc

SEQ ID NO: 59412 - DNA, 50 bp, synthetic construct
  source 1..50: mol_type = other DNA
ccgttttatcaacaaggataccacaaagttaatcctgtataataaaactt

SEQ ID NO: 59413 - DNA, 50 bp, synthetic construct
  source 1..50: mol_type = other DNA
ttctgtacgcttttttgttgtgttccaagcctccaaaaaagcctggaaat

SEQ ID NO: 59414 - DNA, 50 bp, synthetic construct
  source 1..50: mol_type = other DNA
tccgtctcttcgcacgaggcatagcccactgccgtccggggcgtaacgga

SEQ ID NO: 59415 - DNA, 50 bp, synthetic construct
  source 1..50: mol_type = other DNA
tcctccacgctttgtgcatgtcgtcccggacatgcgcccgaagtagcggc

SEQ ID NO: 59416 - DNA, 50 bp, synthetic construct
  source 1..50: mol_type = other DNA
tacaaattattaggctaaaaaatgtacccattttagaagtagatgaatta

SEQ ID NO: 59417 - DNA, 50 bp, synthetic construct
  source 1..50: mol_type = other DNA
caagtcgatgctggcccagcgcctgcgttggcaggggaaggaatgcggtg

SEQ ID NO: 59418 - DNA, 50 bp, synthetic construct
  source 1..50: mol_type = other DNA
cccatgcaattgattatcatttaaagtgggctgataaaaaagttcatgtc

SEQ ID NO: 59419 - DNA, 50 bp, synthetic construct
  source 1..50: mol_type = other DNA
tgtagttttataaccgtttcttttacaaaaaatactaaatctctactaca

SEQ ID NO: 59420 - DNA, 50 bp, synthetic construct
  source 1..50: mol_type = other DNA
tcttgctgataaactctttagcgataaacctaaaatcttaatcatcttca

SEQ ID NO: 59421 - DNA, 50 bp, synthetic construct
  source 1..50: mol_type = other DNA
ggtggttgatattgaaaggctacaattgtggcccttagtgtaaagcataa

SEQ ID NO: 59422 - DNA, 50 bp, synthetic construct
  source 1..50: mol_type = other DNA
cagaattaattatctttgacgaaacttaacgtcgcggatattgaagataa

SEQ ID NO: 59423 - DNA, 50 bp, synthetic construct
  source 1..50: mol_type = other DNA
aaatgtggttatagcatggtccaacgtttctacttcttatatatacattt

SEQ ID NO: 59424 - DNA, 50 bp, synthetic construct
  source 1..50: mol_type = other DNA
tccaattttggtaaagttcgcacttaaatgaggtttttacttttattatc

SEQ ID NO: 59425 - DNA, 50 bp, synthetic construct
  source 1..50: mol_type = other DNA
atattctgcttgtttgattggatcgtccgccaatcaaacagccaatgatt

SEQ ID NO: 59426 - DNA, 50 bp, synthetic construct
  source 1..50: mol_type = other DNA
aaagccactaaaaaggcaataagaaacgctattgcctttttgctgatgag

SEQ ID NO: 59427 - DNA, 50 bp, synthetic construct
  source 1..50: mol_type = other DNA
ggatatccaccaaatatttcatctgcaaatgaaatgcgtcatttatagac

SEQ ID NO: 59428 - DNA, 50 bp, synthetic construct
  source 1..50: mol_type = other DNA
ctctttaatttgttcctatatttatatgtaatgagggtgaaagataatga

SEQ ID NO: 59429 - DNA, 50 bp, synthetic construct
  source 1..50: mol_type = other DNA
catctatcaaattttattatttcggtcgcggttattttattttgaagtct

SEQ ID NO: 59430 - DNA, 50 bp, synthetic construct
  source 1..50: mol_type = other DNA
acttgcacacatcgaaaaaaaggccatacaacttcctaatacctgcaaaa

SEQ ID NO: 59431 - DNA, 50 bp, synthetic construct
  source 1..50: mol_type = other DNA
ggttcgcaccccaggacatccgcaatccgtctggtcctggcctgcgggga

SEQ ID NO: 59432 - DNA, 50 bp, synthetic construct
  source 1..50: mol_type = other DNA
ccctttaatataagcaatagatcataatataaataaagtatatgaaaatg

SEQ ID NO: 59433 - DNA, 50 bp, synthetic construct
  source 1..50: mol_type = other DNA
atacgtcatataacaaatgaagtaggtactaagttttttatatgatgtat

SEQ ID NO: 59434 - DNA, 50 bp, synthetic construct
  source 1..50: mol_type = other DNA
caccttgttggtgtaattaggtttacaactggctccacgtcaaaaattgt

SEQ ID NO: 59435 - DNA, 50 bp, synthetic construct
  source 1..50: mol_type = other DNA
ttagttactatcatataatctttttataaagaagttatgtttctttcttt

SEQ ID NO: 59436 - DNA, 50 bp, synthetic construct
  source 1..50: mol_type = other DNA
tttttcatttgcattgtctataattaacaaggaggtctacctatgaaaac

SEQ ID NO: 59437 - DNA, 50 bp, synthetic construct
  source 1..50: mol_type = other DNA
gaatagtagtttaatttttgtctatagggacaaaaattataaaccgagaa

SEQ ID NO: 59438 - DNA, 50 bp, synthetic construct
  source 1..50: mol_type = other DNA
ttttgggttaatggtccatttcctctagtaaatgttttattaacccaaaa

SEQ ID NO: 59439 - DNA, 50 bp, synthetic construct
  source 1..50: mol_type = other DNA
aagaagaaaaggtaataaatgaatatattcaggtattggtacgccttact

SEQ ID NO: 59440 - DNA, 50 bp, synthetic construct
  source 1..50: mol_type = other DNA
cggtttctgggaataaaaaaggggctatccctttagtgataggggtttta

SEQ ID NO: 59441 - DNA, 50 bp, synthetic construct
  source 1..50: mol_type = other DNA
tattagatgaaataataaagaaaaatgatatacaattagaagatttaata

SEQ ID NO: 59442 - DNA, 50 bp, synthetic construct
  source 1..50: mol_type = other DNA
atattaattttaaatttaagtaattaattgattaaaagtaaccttaatta

SEQ ID NO: 59443 - DNA, 50 bp, synthetic construct
  source 1..50: mol_type = other DNA
tatcataggaggaagcccgccattggaatgtcgggctaaattaaatgata

SEQ ID NO: 59444 - DNA, 50 bp, synthetic construct
  source 1..50: mol_type = other DNA
tctgtctatgtgtttggtatgtcgtatatcataatctccacaacgaatgt

SEQ ID NO: 59445 - DNA, 50 bp, synthetic construct
  source 1..50: mol_type = other DNA
caataaatataaaaccgcatcacgtaaatgatgcggtttttataaaaaaa

SEQ ID NO: 59446 - DNA, 50 bp, synthetic construct
  source 1..50: mol_type = other DNA
tagaggcgacggcctccttttttttccaaaaaaaaagaaatcccccttcc

SEQ ID NO: 59447 - DNA, 50 bp, synthetic construct
  source 1..50: mol_type = other DNA
acagacaaccctgcgcagggtcgccggcggcggaaagcgcttcgagctga

SEQ ID NO: 59448 - DNA, 50 bp, synthetic construct
  source 1..50: mol_type = other DNA
ccggcgaaaggtcagatttatgacttttcgttaagctgaccttatggtga

SEQ ID NO: 59449 - DNA, 50 bp, synthetic construct
  source 1..50: mol_type = other DNA
ctttatgaatatgcagggacttatgcatacagctttgatgatgaagaaac

SEQ ID NO: 59450 - DNA, 50 bp, synthetic construct
  source 1..50: mol_type = other DNA
agttgcgattcctgatcggcttttttaaatcgggaaggagttacgcatgg

SEQ ID NO: 59451 - DNA, 50 bp, synthetic construct
  source 1..50: mol_type = other DNA
ggtactgcccgttgttgtccttcagccgaagaaccacaaagtctccggcc

SEQ ID NO: 59452 - DNA, 50 bp, synthetic construct
  source 1..50: mol_type = other DNA
cacggcagaaaactcttccagtgaatcccccggagccgttttcttccctg

SEQ ID NO: 59453 - DNA, 50 bp, synthetic construct
  source 1..50: mol_type = other DNA
aaagcccgcagggtgagcgtgagggcataggcggccaccctgcgtttttt

SEQ ID NO: 59454 - DNA, 50 bp, synthetic construct
  source 1..50: mol_type = other DNA
tggaagcgataattgaattcttacgcgtaattcttcaacgggataaaaaa

SEQ ID NO: 59455 - DNA, 50 bp, synthetic construct
  source 1..50: mol_type = other DNA
aagaaaaataaaaagatacaagaaaaagccataaggcttttctttttacc

SEQ ID NO: 59456 - DNA, 50 bp, synthetic construct
  source 1..50: mol_type = other DNA
tcgggatataagtcgcttcaaaccaaactttcaaaccatttttatctcgg

SEQ ID NO: 59457 - DNA, 50 bp, synthetic construct
  source 1..50: mol_type = other DNA
actattgaatggatttagcggcttgtaagccgctcaatttacgcaattaa

SEQ ID NO: 59458 - DNA, 50 bp, synthetic construct
  source 1..50: mol_type = other DNA
tcgatgctcaaattaattattatgaacatgtaaaataaagagagcctccg

SEQ ID NO: 59459 - DNA, 50 bp, synthetic construct
  source 1..50: mol_type = other DNA
atacttccttatgagcacctaccattaggtagtttctcataaggaagtaa

SEQ ID NO: 59460 - DNA, 50 bp, synthetic construct
  source 1..50: mol_type = other DNA
ttagtaataatgggttgacacacttagtattatacacccatcgaaacacg

SEQ ID NO: 59461 - DNA, 50 bp, synthetic construct
  source 1..50: mol_type = other DNA
ctttttgttgtcaccttgttggtgtacaccaacacgatggcgacaaagat

SEQ ID NO: 59462 - DNA, 50 bp, synthetic construct
  source 1..50: mol_type = other DNA
caatgtttttataaacagaaaaaaggatgtaaccaaatttaattatattc

SEQ ID NO: 59463 - DNA, 50 bp, synthetic construct
  source 1..50: mol_type = other DNA
attgaagataatgaaaacattctaaaaagagctatatagaaatgttattt

SEQ ID NO: 59464 - DNA, 50 bp, synthetic construct
  source 1..50: mol_type = other DNA
ttacattcgttgtggagattatgatatatttccatcaaaaactttttccg

SEQ ID NO: 59465 - DNA, 50 bp, synthetic construct
  source 1..50: mol_type = other DNA
tgtccccaacccagaatgaccaattatatggtcactcaggggtgcagaag

SEQ ID NO: 59466 - DNA, 50 bp, synthetic construct
  source 1..50: mol_type = other DNA
aatgtttttataaacagaaaaaaggggatgtaaccaaatttaaatatatt

SEQ ID NO: 59467 - DNA, 50 bp, synthetic construct
  source 1..50: mol_type = other DNA
ccaaataaaaatagaaaattaacatttgttgtttttctatttttattcgg

SEQ ID NO: 59468 - DNA, 50 bp, synthetic construct
  source 1..50: mol_type = other DNA
catactactaaattgaacctaccgaccggaggggttcagttagtagtata

SEQ ID NO: 59469 - DNA, 50 bp, synthetic construct
  source 1..50: mol_type = other DNA
gcaattcaaaggaaagagaactcctaaaaatatgggggtttttaatgaaa

SEQ ID NO: 59470 - DNA, 50 bp, synthetic construct
  source 1..50: mol_type = other DNA
ctttatgctgcaggaagtccctatagaatgggcagacctgcagcatcttg

SEQ ID NO: 59471 - DNA, 50 bp, synthetic construct
  source 1..50: mol_type = other DNA
acagacaaccctgcgcagggtcgccggcgccgcagacggtgtcggcctgg

SEQ ID NO: 59472 - DNA, 50 bp, synthetic construct
  source 1..50: mol_type = other DNA
tctgacgtcgctcgataacactcggagtctctttagcgagctggctcatg

SEQ ID NO: 59473 - DNA, 50 bp, synthetic construct
  source 1..50: mol_type = other DNA
tgtcggatcgtagaagtatagggtttgagatatacttttggcgagcagct

SEQ ID NO: 59474 - DNA, 50 bp, synthetic construct
  source 1..50: mol_type = other DNA
ctttatttgtgtttatattatcgatactaataaattaaacactaaaaata

SEQ ID NO: 59475 - DNA, 50 bp, synthetic construct
  source 1..50: mol_type = other DNA
tggttttagccttttgccgagcgacatccccgagtgcccggtcaacgcca

SEQ ID NO: 59476 - DNA, 50 bp, synthetic construct
  source 1..50: mol_type = other DNA
tatctttaactatgtgataccgggcggccagtatcacaagaatactgatt

SEQ ID NO: 59477 - DNA, 50 bp, synthetic construct
  source 1..50: mol_type = other DNA
ggacgcccccggtggcccgcgagaccgggcggccgcggtcgtgggcgtcg

SEQ ID NO: 59478 - DNA, 50 bp, synthetic construct
  source 1..50: mol_type = other DNA
ttcatataatcaccttttgtattagttagtagaccagattttgaaccgaa

SEQ ID NO: 59479 - DNA, 50 bp, synthetic construct
  source 1..50: mol_type = other DNA
tacaaactctttccatataatcacctgtttctatattaattttatctgtt

SEQ ID NO: 59480 - DNA, 50 bp, synthetic construct
  source 1..50: mol_type = other DNA
gctgaatcacttgattagcctgatgaatcagaaccttggcttgcgttctg

SEQ ID NO: 59481 - DNA, 50 bp, synthetic construct
  source 1..50: mol_type = other DNA
tatttaatatactgataaaaatttcttaatacttatcagtaaataaaata

SEQ ID NO: 59482 - DNA, 50 bp, synthetic construct
  source 1..50: mol_type = other DNA
caaggggtgaacccttgcttgaaaggcaccaaagtagtcagtttcaaact

SEQ ID NO: 59483 - DNA, 50 bp, synthetic construct
  source 1..50: mol_type = other DNA
ttatcgacctcaaaggtaatgaacaaattatagctgttttagtttgatat

SEQ ID NO: 59484 - DNA, 50 bp, synthetic construct
  source 1..50: mol_type = other DNA
tcgcccgtgtgtgctggttgttggtggcaatctccagccttaatgccgaa

SEQ ID NO: 59485 - DNA, 50 bp, synthetic construct
  source 1..50: mol_type = other DNA
tattataatgtagtagtcacttccatggaagtgattatttttgcataaaa

SEQ ID NO: 59486 - DNA, 50 bp, synthetic construct
  source 1..50: mol_type = other DNA
tttcattaaaaacccccatatttttaggagttctctttcctttgaattgc

SEQ ID NO: 59487 - DNA, 50 bp, synthetic construct
  source 1..50: mol_type = other DNA
ggcggcaggtacagcttcaaaacccggttgatgaagaaagccataacgtt

SEQ ID NO: 59488 - DNA, 50 bp, synthetic construct
  source 1..50: mol_type = other DNA
gatcacgcggggcaaggttcgaacgtgctcgaaccttgccccgtctctac

SEQ ID NO: 59489 - DNA, 50 bp, synthetic construct
  source 1..50: mol_type = other DNA
aagcttgattaacagtgttttgttgccacaattacctacaagccatttcg

SEQ ID NO: 59490 - DNA, 50 bp, synthetic construct
  source 1..50: mol_type = other DNA
ttcatttattaaccccttactatgtatcgtcaaaagcatttccaaagtaa

SEQ ID NO: 59491 - DNA, 50 bp, synthetic construct
  source 1..50: mol_type = other DNA
tgacgctgttttgttgcgtgttctttccgacatgctggttaacacgattg

SEQ ID NO: 59492 - DNA, 50 bp, synthetic construct
  source 1..50: mol_type = other DNA
gcggtcgccggattggtcgcgggtggaggacaggccatgaaccaaacggc

SEQ ID NO: 59493 - DNA, 50 bp, synthetic construct
  source 1..50: mol_type = other DNA
tgcggccgggcgaggagccgttgcccacaaccagcccaaccccagctgct

SEQ ID NO: 59494 - DNA, 50 bp, synthetic construct
  source 1..50: mol_type = other DNA
ggtcgcagcgcaccagcgttggaagtttccaccctgacggacacccggtt

SEQ ID NO: 59495 - DNA, 50 bp, synthetic construct
  source 1..50: mol_type = other DNA
ccccacgccctcggccacggtgaccggtggtttatgccacgagcttggga

SEQ ID NO: 59496 - DNA, 50 bp, synthetic construct
  source 1..50: mol_type = other DNA
cagtgttacttacaaagagcttgctcccaacgttttcacatgtaacactg

SEQ ID NO: 59497 - DNA, 50 bp, synthetic construct
  source 1..50: mol_type = other DNA
tgtgtgagaaaagactacccgtttgagaacggatagtcatataatgcact

SEQ ID NO: 59498 - DNA, 50 bp, synthetic construct
  source 1..50: mol_type = other DNA
cgcaacgcaactatttgcgcattcatcactgcgctataggttgcaatgtt

SEQ ID NO: 59499 - DNA, 50 bp, synthetic construct
  source 1..50: mol_type = other DNA
cgcaacgcaactatttgcgcagtgatgaatgcgctataggttgcaatgtt

SEQ ID NO: 59500 - DNA, 50 bp, synthetic construct
  source 1..50: mol_type = other DNA
aattagaaattacttcttgctaataaattaaaaaggggtaatctgtaccc

SEQ ID NO: 59501 - DNA, 50 bp, synthetic construct
  source 1..50: mol_type = other DNA
tcagtgattggattggattgccgggcccgggcgaccgaggaatacacgcg

SEQ ID NO: 59502 - DNA, 50 bp, synthetic construct
  source 1..50: mol_type = other DNA
tcgtctttaatgtagcgtaatgttagcatattatgctacattattcaaac

SEQ ID NO: 59503 - DNA, 50 bp, synthetic construct
  source 1..50: mol_type = other DNA
ttatcaataattaaaaaccgcatcatgatgcggttttttcagccgcttca

SEQ ID NO: 59504 - DNA, 50 bp, synthetic construct
  source 1..50: mol_type = other DNA
caaaaactatacttgaacaatcatatatgatatagaaaaattatattgag

SEQ ID NO: 59505 - DNA, 50 bp, synthetic construct
  source 1..50: mol_type = other DNA
agtttggacaatagtacaccggttgagtcggttgttaaattgtccaaacg

SEQ ID NO: 59506 - DNA, 50 bp, synthetic construct
  source 1..50: mol_type = other DNA
acactatcaatcagcgctttaatagcttttacattggtggaaatgtaggt

SEQ ID NO: 59507 - DNA, 50 bp, synthetic construct
  source 1..50: mol_type = other DNA
agtttggacaatagtacatcggttgaggcggttgtgaaattgtccaaacg

SEQ ID NO: 59508 - DNA, 50 bp, synthetic construct
  source 1..50: mol_type = other DNA
gataacaagaaaactttgtgcagatgactaattttccctttagagtgata

SEQ ID NO: 59509 - DNA, 50 bp, synthetic construct
  source 1..50: mol_type = other DNA
aaaactttgtgcagatgacttaccagtgttcttcatcaggacaggaagaa

SEQ ID NO: 59510 - DNA, 50 bp, synthetic construct
  source 1..50: mol_type = other DNA
cggatgagggcatctcagcgaccaatttgcccatgaaatcaacaaatcta

SEQ ID NO: 59511 - DNA, 50 bp, synthetic construct
  source 1..50: mol_type = other DNA
aacagaaaaaggatgatttgatactagtgccaaattatcctcagcacgtt

SEQ ID NO: 59512 - DNA, 50 bp, synthetic construct
  source 1..50: mol_type = other DNA
cgggaactagaacttactttgagaattcccaaagtaagttctagtctgtc

SEQ ID NO: 59513 - DNA, 50 bp, synthetic construct
  source 1..50: mol_type = other DNA
aatctaattatgatgtgactcttatttaagagtaacaattgcacaacatg

SEQ ID NO: 59514 - DNA, 50 bp, synthetic construct
  source 1..50: mol_type = other DNA
attaactgcgacacacactccacatgtgttgaatgtttgtggcagataaa

SEQ ID NO: 59515 - DNA, 50 bp, synthetic construct
  source 1..50: mol_type = other DNA
gttttttaatgaaacctcatttactttatgataaggttcaccataatata

SEQ ID NO: 59516 - DNA, 50 bp, synthetic construct
  source 1..50: mol_type = other DNA
actgcactgcagcttaatttaaaccagtttaattgaaatggaggtgaaca

SEQ ID NO: 59517 - DNA, 50 bp, synthetic construct
  source 1..50: mol_type = other DNA
ctggtattgccattggttctttcaaatgacaaaaagtgatctaataccat

SEQ ID NO: 59518 - DNA, 50 bp, synthetic construct
  source 1..50: mol_type = other DNA
aactaaatcattattcaaattcattatataagatgtataataagctacct

SEQ ID NO: 59519 - DNA, 50 bp, synthetic construct
  source 1..50: mol_type = other DNA
agttaaatatgctatatggaatagtactgatatttatattataattcata

SEQ ID NO: 59520 - DNA, 50 bp, synthetic construct
  source 1..50: mol_type = other DNA
aaaacagcctcctaaagtcggttttaaaagcccctttatgcgggctttta

SEQ ID NO: 59521 - DNA, 50 bp, synthetic construct
  source 1..50: mol_type = other DNA
tcccttcaaacactacacatctcaaacgtgatgtgtagtgtttgcaaaga

SEQ ID NO: 59522 - DNA, 50 bp, synthetic construct
  source 1..50: mol_type = other DNA
gactattcgtactttctaaacttaactatgtttagaagaactttttcact

SEQ ID NO: 59523 - DNA, 50 bp, synthetic construct
  source 1..50: mol_type = other DNA
ttgaacagtttgttgtggatcaaattattgatatgtaaggagagattgcg

SEQ ID NO: 59524 - DNA, 50 bp, synthetic construct
  source 1..50: mol_type = other DNA
aaatatatttaaaggtgtaataagtctttattacagttttaaatcacgtt

SEQ ID NO: 59525 - DNA, 50 bp, synthetic construct
  source 1..50: mol_type = other DNA
atgtacttgaatgtatagattatttattatagattatttatcctgcccaa

SEQ ID NO: 59526 - DNA, 50 bp, synthetic construct
  source 1..50: mol_type = other DNA
cttgaggaaaaaaagattaaagaagccacaccaatcgtttccggcgcaaa

SEQ ID NO: 59527 - DNA, 50 bp, synthetic construct
  source 1..50: mol_type = other DNA
cgcataaaagactaaaccatattcaagaacaaggttttaacttttatgtc

SEQ ID NO: 59528 - DNA, 50 bp, synthetic construct
  source 1..50: mol_type = other DNA
agcctctaaagggctcttagtttgcgcaaactaaaacaataataatcact

SEQ ID NO: 59529 - DNA, 50 bp, synthetic construct
  source 1..50: mol_type = other DNA
ttctcctttcgcacatacgttcttttctcgaattatttccgaaaaattgc

SEQ ID NO: 59530 - DNA, 50 bp, synthetic construct
  source 1..50: mol_type = other DNA
tttggtatctcgtttcttcttcttccaacgagagaaaacgaggaactaaa

SEQ ID NO: 59531 - DNA, 50 bp, synthetic construct
  source 1..50: mol_type = other DNA
gggtcgcgtaggttagtacttagtgcactatgtaccaaccaagcgggccg

SEQ ID NO: 59532 - DNA, 50 bp, synthetic construct
  source 1..50: mol_type = other DNA
tgaagggcttagaattgattttatgccaagcgtaaaggccgtatgggaat

SEQ ID NO: 59533 - DNA, 50 bp, synthetic construct
  source 1..50: mol_type = other DNA
taatttatttggttttctatttattttacaatataaaccataaatgatta

SEQ ID NO: 59534 - DNA, 50 bp, synthetic construct
  source 1..50: mol_type = other DNA
ttagctccgattttgatacatagcaaagtctatgtcaaaatcacgataat

SEQ ID NO: 59535 - DNA, 50 bp, synthetic construct
  source 1..50: mol_type = other DNA
gagggttcgagtaagaacaaaatggccgcggagatcttgcaggcttactc

SEQ ID NO: 59536 - DNA, 50 bp, synthetic construct
  source 1..50: mol_type = other DNA
aaacgacgcgcttggccattggccgggggggtgtcgcgtgcgcgtcgcaa

SEQ ID NO: 59537 - DNA, 50 bp, synthetic construct
  source 1..50: mol_type = other DNA
taatttcttctccgtaaaaccatctaaggtcatttatcgagcagattcgg

SEQ ID NO: 59538 - DNA, 50 bp, synthetic construct
  source 1..50: mol_type = other DNA
gatttataaaaacatagagtctgtcaaatgattggtgcttttgcattatt

SEQ ID NO: 59539 - DNA, 50 bp, synthetic construct
  source 1..50: mol_type = other DNA
tgtatgcacaccttaccacagtactcactttaagcataggtgtgcataca

SEQ ID NO: 59540 - DNA, 50 bp, synthetic construct
  source 1..50: mol_type = other DNA
tataaacagaaaaaagggtagatgatactggtttagttagcaggggtata

SEQ ID NO: 59541 - DNA, 50 bp, synthetic construct
  source 1..50: mol_type = other DNA
gaaaaaataaatatctttgttgtcatgacgacaaaaagcaaacgtttatt

SEQ ID NO: 59542 - DNA, 50 bp, synthetic construct
  source 1..50: mol_type = other DNA
tggttacatccttgctaattaaaccagtataaccgttcatcatctaccct

SEQ ID NO: 59543 - DNA, 50 bp, synthetic construct
  source 1..50: mol_type = other DNA
gaacagaatctatttaaatttggttaaaccagtataaccgttcatcatct

SEQ ID NO: 59544 - DNA, 50 bp, synthetic construct
  source 1..50: mol_type = other DNA
tgtttttataaacagaaaaaagggtaaccaaatttaaatagattctgttc

SEQ ID NO: 59545 - DNA, 50 bp, synthetic construct
  source 1..50: mol_type = other DNA
ttgtgttctcaaggaatagacaacacgcatcacgtggagtgcgtagtgtt

SEQ ID NO: 59546 - DNA, 50 bp, synthetic construct
  source 1..50: mol_type = other DNA
tctctgtaaaaataaatattctctattaagaaagcttatccttgcaaacg

SEQ ID NO: 59547 - DNA, 50 bp, synthetic construct
  source 1..50: mol_type = other DNA
ttgacatgtcggcggtcaggactggcaggtcatgaggcccgagaaggcga

SEQ ID NO: 59548 - DNA, 50 bp, synthetic construct
  source 1..50: mol_type = other DNA
cctgtggtcttgtaggtaattgtggcaacaaaacactactaagccagctc

SEQ ID NO: 59549 - DNA, 50 bp, synthetic construct
  source 1..50: mol_type = other DNA
ataccattcaaaacggaaaggctgtacaaaatataccactttaatattat

SEQ ID NO: 59550 - DNA, 50 bp, synthetic construct
  source 1..50: mol_type = other DNA
ggacttgatttacaaagcacttaaatttttaggtttcatgcttcaatacc

SEQ ID NO: 59551 - DNA, 50 bp, synthetic construct
  source 1..50: mol_type = other DNA
gtcccgtcggcgaggcactgatcgcccggtaggtcggccggttcgcggag

SEQ ID NO: 59552 - DNA, 50 bp, synthetic construct
  source 1..50: mol_type = other DNA
aaatcttccaaaaaatgtttcgagatgaaatatattttcgtttgttctgt

SEQ ID NO: 59553 - DNA, 50 bp, synthetic construct
  source 1..50: mol_type = other DNA
aatcgaaagattatccaaaaaataattaacttgctatgtatcaaaattag

SEQ ID NO: 59554 - DNA, 50 bp, synthetic construct
  source 1..50: mol_type = other DNA
aggaattagttaatatatatgataaaaattaactaccactacaaatgaga

SEQ ID NO: 59555 - DNA, 50 bp, synthetic construct
  source 1..50: mol_type = other DNA
gtaggtgcatatggttacaacctgctcaggttgtgggataatgcaccaac

SEQ ID NO: 59556 - DNA, 50 bp, synthetic construct
  source 1..50: mol_type = other DNA
aagcattgaagccagaatcaacgtcgccgttgaagttgagcaccaccctg

SEQ ID NO: 59557 - DNA, 50 bp, synthetic construct
  source 1..50: mol_type = other DNA
taaaaaaagagtctgaaaaacatcctatttgatagttgtctcttttttta

SEQ ID NO: 59558 - DNA, 50 bp, synthetic construct
  source 1..50: mol_type = other DNA
tgtttaatttttatttaaaaagacaagtgttttagaagataaaagaaaca

SEQ ID NO: 59559 - DNA, 50 bp, synthetic construct
  source 1..50: mol_type = other DNA
ctttaggtggtgtatttaaacgtgtcaaggtctaaatacactatgaggtt

SEQ ID NO: 59560 - DNA, 50 bp, synthetic construct
  source 1..50: mol_type = other DNA
aaaaggttaatattgccgttagttactcttgttggtattatttacctttt

SEQ ID NO: 59561 - DNA, 50 bp, synthetic construct
  source 1..50: mol_type = other DNA
aatttgtgatctttcccgaagaaagtttccttcgggagaattgggtgatt

SEQ ID NO: 59562 - DNA, 50 bp, synthetic construct
  source 1..50: mol_type = other DNA
caaaatcactgataagcagaagcataaggttcttcttattggtgaaattg

SEQ ID NO: 59563 - DNA, 50 bp, synthetic construct
  source 1..50: mol_type = other DNA
ctctgtagttatgcactgtacattctaatgtatagtgataactttcattc

SEQ ID NO: 59564 - DNA, 50 bp, synthetic construct
  source 1..50: mol_type = other DNA
aatgcttttctccaattagcgccctcttcacatcagcaaaaaatgtcatc

SEQ ID NO: 59565 - DNA, 50 bp, synthetic construct
  source 1..50: mol_type = other DNA
ggcactaacctcttcctaaagctcatgaacttttagaatatcttaaagtg

SEQ ID NO: 59566 - DNA, 50 bp, synthetic construct
  source 1..50: mol_type = other DNA
attaatgttcattttcctgtaatcatgattacagggaaactaattattct

SEQ ID NO: 59567 - DNA, 50 bp, synthetic construct
  source 1..50: mol_type = other DNA
ggattctagagttatgtcataaccgagaaccttagttaagttttcttaaa

SEQ ID NO: 59568 - DNA, 50 bp, synthetic construct
  source 1..50: mol_type = other DNA
cgaatcccgaagaatttagttttataaaaaacagtttccttcgggagaat

SEQ ID NO: 59569 - DNA, 50 bp, synthetic construct
  source 1..50: mol_type = other DNA
agaattaaaaacgaagaagaactgtcgtgttaggcaccgatgccaattcg

SEQ ID NO: 59570 - DNA, 50 bp, synthetic construct
  source 1..50: mol_type = other DNA
attgatagtccagtgcccgtattcatgaaagggggcaccaggttactggt

SEQ ID NO: 59571 - DNA, 50 bp, synthetic construct
  source 1..50: mol_type = other DNA
cctcctataaattaggatatatatttataacataaataattgataggagt

SEQ ID NO: 59572 - DNA, 50 bp, synthetic construct
  source 1..50: mol_type = other DNA
ttgtgggaaagaagtactaccgtctcaacggtattacctttttcccacaa

SEQ ID NO: 59573 - DNA, 50 bp, synthetic construct
  source 1..50: mol_type = other DNA
ataaacaaggttcaggtaacagctgatgtcttttcttgtacccattttat

SEQ ID NO: 59574 - DNA, 50 bp, synthetic construct
  source 1..50: mol_type = other DNA
tttattcgaaaaaatatcattatttgagtgattgatattttttgtctatt

SEQ ID NO: 59575 - DNA, 50 bp, synthetic construct
  source 1..50: mol_type = other DNA
ccaagaacaagctttagaaggacatacgtagttctaacaattctttttgt

SEQ ID NO: 59576 - DNA, 50 bp, synthetic construct
  source 1..50: mol_type = other DNA
tgtagaatcttttccaaaagaagaggatttacttccgacaactgacacaa

SEQ ID NO: 59577 - DNA, 50 bp, synthetic construct
  source 1..50: mol_type = other DNA
gctcacacccgctacattaaaaaaagttcattcatagagaggtgattcaa

SEQ ID NO: 59578 - DNA, 50 bp, synthetic construct
  source 1..50: mol_type = other DNA
aaaacacatccgttcgaatgttccttcgttcaatggaagagatgtgaaag

SEQ ID NO: 59579 - DNA, 50 bp, synthetic construct
  source 1..50: mol_type = other DNA
tcaaaggatgaggactatgtttttaggaaaaaacagtctgtgggatttac

SEQ ID NO: 59580 - DNA, 50 bp, synthetic construct
  source 1..50: mol_type = other DNA
agcaatatcattcactcatgatacccgtatcataaatgatgatatttttt

SEQ ID NO: 59581 - DNA, 50 bp, synthetic construct
  source 1..50: mol_type = other DNA
ggataatacgcactttacccaattaagaatggggaaattgttggcataga

SEQ ID NO: 59582 - DNA, 50 bp, synthetic construct
  source 1..50: mol_type = other DNA
ttccgggccctaataatggtggaaatttccatcttggtcattgaaaggaa

SEQ ID NO: 59583 - DNA, 50 bp, synthetic construct
  source 1..50: mol_type = other DNA
aaggagctacattatatttatttttataaacattactattgtttgattat

SEQ ID NO: 59584 - DNA, 50 bp, synthetic construct
  source 1..50: mol_type = other DNA
caatttttcggaaataattcgagaaaaaagaacatatgtgcgaaaggaga

SEQ ID NO: 59585 - DNA, 50 bp, synthetic construct
  source 1..50: mol_type = other DNA
ttgtttattcaaattgtttagtttctgataccaaagatgcaaataattct

SEQ ID NO: 59586 - DNA, 50 bp, synthetic construct
  source 1..50: mol_type = other DNA
tttatttttatgattttgataatcatgatgaaaaagataacgaaaataga

SEQ ID NO: 59587 - DNA, 50 bp, synthetic construct
  source 1..50: mol_type = other DNA
actttgctttaggatacttatgttttaccatccttaaaagcaaccaaagt

SEQ ID NO: 59588 - DNA, 50 bp, synthetic construct
  source 1..50: mol_type = other DNA
tggtatctttaattatgtgaaactccggtatcacatacttaaagatattg

SEQ ID NO: 59589 - DNA, 50 bp, synthetic construct
  source 1..50: mol_type = other DNA
taaaatagttgatggtaaagcagaaatcagtgaaaagtggaactatttta

SEQ ID NO: 59590 - DNA, 50 bp, synthetic construct
  source 1..50: mol_type = other DNA
aaaactaggggcattcttttgattaatcagaaaagttctcggatatgctt

SEQ ID NO: 59591 - DNA, 50 bp, synthetic construct
  source 1..50: mol_type = other DNA
attcccatacggcctttacgcttggcataaaatcaattctaagccctcaa

SEQ ID NO: 59592 - DNA, 50 bp, synthetic construct
  source 1..50: mol_type = other DNA
acaagtggactatatagagttagaaaaatgtaggtataactataacgtga

SEQ ID NO: 59593 - DNA, 50 bp, synthetic construct
  source 1..50: mol_type = other DNA
gtaaaaattgaatttaaataaagggattattattaaaaatcacttgccat

SEQ ID NO: 59594 - DNA, 50 bp, synthetic construct
  source 1..50: mol_type = other DNA
ttttacacctaattggggataaaacagttcatggctaattaaagggaaca

SEQ ID NO: 59595 - DNA, 50 bp, synthetic construct
  source 1..50: mol_type = other DNA
gaaaactttgtttaatgtttaatgtaccatatactttatacaaaattttt

SEQ ID NO: 59596 - DNA, 50 bp, synthetic construct
  source 1..50: mol_type = other DNA
tcttctccggccagggttttagtaactaatcaaaaaagatgggagcgcgc

SEQ ID NO: 59597 - DNA, 50 bp, synthetic construct
  source 1..50: mol_type = other DNA
agttgtacgatagaatttatagttttcattttaatttctattacacactt

SEQ ID NO: 59598 - DNA, 50 bp, synthetic construct
  source 1..50: mol_type = other DNA
gagtgatcagtattcaccagacagactggacagaccctgagcgagcactg

SEQ ID NO: 59599 - DNA, 50 bp, synthetic construct
  source 1..50: mol_type = other DNA
atcgactgaactgactctttagcatcgcgaaacgaacagtatcagtcgaa

SEQ ID NO: 59600 - DNA, 50 bp, synthetic construct
  source 1..50: mol_type = other DNA
acacacggaagggtctaaaaggtctcgcaatttgcgggggttccgtacat

SEQ ID NO: 59601 - DNA, 50 bp, synthetic construct
  source 1..50: mol_type = other DNA
tatttcctgttttattaataccgaattcggcattgtagcattagccataa

SEQ ID NO: 59602 - DNA, 50 bp, synthetic construct
  source 1..50: mol_type = other DNA
gcgtgtttagctatgtaagagtaccagtattcttgccttaacgctcatgg

SEQ ID NO: 59603 - DNA, 50 bp, synthetic construct
  source 1..50: mol_type = other DNA
gggtgtatttagaaacgtattatactcatatcaggtttctaaatgtacta

SEQ ID NO: 59604 - DNA, 50 bp, synthetic construct
  source 1..50: mol_type = other DNA
ttttggatttagttgaaatttatccaccactaaggtttataaaagcatac

SEQ ID NO: 59605 - DNA, 50 bp, synthetic construct
  source 1..50: mol_type = other DNA
tttaggcaacaacaacactccacatgtatggtatgttgatattgcctaaa

SEQ ID NO: 59606 - DNA, 50 bp, synthetic construct
  source 1..50: mol_type = other DNA
ctttcttgaatgagtcttcatcaatctttgactataagcattcatgactg

SEQ ID NO: 59607 - DNA, 50 bp, synthetic construct
  source 1..50: mol_type = other DNA
tttcaactcattattttacaatgcaaccagcgtaaaaaaatgaaatataa

SEQ ID NO: 59608 - DNA, 50 bp, synthetic construct
  source 1..50: mol_type = other DNA
aaaaatagttatgaaaggaagatcaaattcctcctttcaactcattattt

SEQ ID NO: 59609 - DNA, 50 bp, synthetic construct
  source 1..50: mol_type = other DNA
acgacatgttcaacgcagttcagaagaaaggactgatttttttatgtcga

SEQ ID NO: 59610 - DNA, 50 bp, synthetic construct
  source 1..50: mol_type = other DNA
agagggtttatttggccctaggttcttaacttgtggccaattagacccgc

SEQ ID NO: 59611 - DNA, 50 bp, synthetic construct
  source 1..50: mol_type = other DNA
tgtaggctgtatttttaaatttataaaaaaatataaaaaattcaactatt

SEQ ID NO: 59612 - DNA, 50 bp, synthetic construct
  source 1..50: mol_type = other DNA
ttttccgctttaatcattttttcataagaagtaaccgcagcagcttaaaa

SEQ ID NO: 59613 - DNA, 50 bp, synthetic construct
  source 1..50: mol_type = other DNA
ttttgtgaatctgtaagtgtcggcatttgaaacattaccgatttgattag

SEQ ID NO: 59614 - DNA, 50 bp, synthetic construct
  source 1..50: mol_type = other DNA
aaaatgaacaccacattgactaagatatagtacaaagtggtactcatttt

SEQ ID NO: 59615 - DNA, 50 bp, synthetic construct
  source 1..50: mol_type = other DNA
atttttccggagaattcagatttttatgactatgaataggagtggaaaaa

SEQ ID NO: 59616 - DNA, 50 bp, synthetic construct
  source 1..50: mol_type = other DNA
atggaacgtatagcgtagcatgtctggacgtgttcagtaataggttccac

SEQ ID NO: 59617 - DNA, 50 bp, synthetic construct
  source 1..50: mol_type = other DNA
ggaggtttggtacccggttcgccgcaggaacagccggatcacagccgtcc

SEQ ID NO: 59618 - DNA, 50 bp, synthetic construct
  source 1..50: mol_type = other DNA
acaaactttgagatatccaggtgtttgctccgaggtatggagaagttttg

SEQ ID NO: 59619 - DNA, 50 bp, synthetic construct
  source 1..50: mol_type = other DNA
tagccagatactctatccaactgagctacctgaaaacttgaggctacctg

SEQ ID NO: 59620 - DNA, 50 bp, synthetic construct
  source 1..50: mol_type = other DNA
tttttgtcattcaatctatttcttacaacaaaaggagaaaaaatgaactt

SEQ ID NO: 59621 - DNA, 50 bp, synthetic construct
  source 1..50: mol_type = other DNA
actaaatctgccattgtattaggttcgacttgcacaaaaaaagatttcct

SEQ ID NO: 59622 - DNA, 50 bp, synthetic construct
  source 1..50: mol_type = other DNA
agcgcacaagaactcgaggggtccgtgggcccataaagttgtcgcggcgg

SEQ ID NO: 59623 - DNA, 50 bp, synthetic construct
  source 1..50: mol_type = other DNA
atgcagccggcgctgaacgcaagaacaaggtttcaaagcgccgcatccac

SEQ ID NO: 59624 - DNA, 50 bp, synthetic construct
  source 1..50: mol_type = other DNA
ttccgccacttcggtcggtccggccaaatggcccgacttgctcggctgcc

SEQ ID NO: 59625 - DNA, 50 bp, synthetic construct
  source 1..50: mol_type = other DNA
agatttgcacattaaatagcgagcatgttctcgtcgggatgccagaacgg

SEQ ID NO: 59626 - DNA, 50 bp, synthetic construct
  source 1..50: mol_type = other DNA
tgtccctacgtccctatgtcataagaaggtgaaatagtgacggtggtgtt

SEQ ID NO: 59627 - DNA, 50 bp, synthetic construct
  source 1..50: mol_type = other DNA
gtggaaccaataacatagcacgtctggatatgctctgtaaaaggttccgc

SEQ ID NO: 59628 - DNA, 50 bp, synthetic construct
  source 1..50: mol_type = other DNA
gctggggcgtctcgcgcatcacgcggtggtgaccatctcgcgggcccggg

SEQ ID NO: 59629 - DNA, 50 bp, synthetic construct
  source 1..50: mol_type = other DNA
gatgttagcaagcatctcgagtgtgaaagttcgaaccagttagcgcttgc

SEQ ID NO: 59630 - DNA, 50 bp, synthetic construct
  source 1..50: mol_type = other DNA
accgatggaacgtatagcgtagcatgtgttcaatgataggttccacggca

SEQ ID NO: 59631 - DNA, 50 bp, synthetic construct
  source 1..50: mol_type = other DNA
taatttaagtttggactatcatttcaaaatggcatttttgacaataatgc

SEQ ID NO: 59632 - DNA, 50 bp, synthetic construct
  source 1..50: mol_type = other DNA
gagttggacgagaaaaatgataaaattttatcattttttaggaaattttg

SEQ ID NO: 59633 - DNA, 50 bp, synthetic construct
  source 1..50: mol_type = other DNA
tgagaattttactatccttgattgagaaatgtaggttactaaaattattt

SEQ ID NO: 59634 - DNA, 50 bp, synthetic construct
  source 1..50: mol_type = other DNA
cactctttgtatcaacgctatgcactcgacgtgtgttgtcaataggatag

SEQ ID NO: 59635 - DNA, 50 bp, synthetic construct
  source 1..50: mol_type = other DNA
ctatttcactctttgtatcaacgctaggataggaacacaaattattaacc

SEQ ID NO: 59636 - DNA, 50 bp, synthetic construct
  source 1..50: mol_type = other DNA
aagtttggataataatgaacaagttggagtgcatagcgttgatacaaaga

SEQ ID NO: 59637 - DNA, 50 bp, synthetic construct
  source 1..50: mol_type = other DNA
ctatttgtcaaaatagaagcaaaatactagattaataacttgataaatag

SEQ ID NO: 59638 - DNA, 50 bp, synthetic construct
  source 1..50: mol_type = other DNA
tgtgtatcaacctaaatcctgactaagtggctgtttggagattatacaca

SEQ ID NO: 59639 - DNA, 50 bp, synthetic construct
  source 1..50: mol_type = other DNA
ttttctatatctttatatttttaccactaaaaatatatcttggtaatttt

SEQ ID NO: 59640 - DNA, 50 bp, synthetic construct
  source 1..50: mol_type = other DNA
atatcttttgtatcaacgctatagcttttgattgggaacataatttttta

SEQ ID NO: 59641 - DNA, 50 bp, synthetic construct
  source 1..50: mol_type = other DNA
acgaggataaaaaattatgttcccaacgcatcatgtggagactatagcgt

SEQ ID NO: 59642 - DNA, 50 bp, synthetic construct
  source 1..50: mol_type = other DNA
agagatatcttccagagtacgttgaattcgatacagcgcgttatatgccg

SEQ ID NO: 59643 - DNA, 50 bp, synthetic construct
  source 1..50: mol_type = other DNA
aatcacctcgctcttaatagaactatcttggcgaagagcgtttcttgaaa

SEQ ID NO: 59644 - DNA, 50 bp, synthetic construct
  source 1..50: mol_type = other DNA
gtacaatctccaaaaactatttgacctcaaatagtttctcaatcttaact

SEQ ID NO: 59645 - DNA, 50 bp, synthetic construct
  source 1..50: mol_type = other DNA
cactaacgccaattttgagatgaccggtgacgatcactttgccgttttct

SEQ ID NO: 59646 - DNA, 50 bp, synthetic construct
  source 1..50: mol_type = other DNA
ttcagcccgaaaaagaccttgccgttcgccaaccagatgatcaaactcga

SEQ ID NO: 59647 - DNA, 50 bp, synthetic construct
  source 1..50: mol_type = other DNA
ccgggagtcccggggtgttcccaatagcggggacacctccttcaatacga

SEQ ID NO: 59648 - DNA, 50 bp, synthetic construct
  source 1..50: mol_type = other DNA
atgatataattaaagggcagaaagatctgccttccctttttttgagaagg

SEQ ID NO: 59649 - DNA, 50 bp, synthetic construct
  source 1..50: mol_type = other DNA
accagtcccgcgtttgagtcgcccacatgcgatcaccggaagccactgga

SEQ ID NO: 59650 - DNA, 50 bp, synthetic construct
  source 1..50: mol_type = other DNA
tatcatttattcctgttaatcatacaaaagattaacaggaataaaattga

SEQ ID NO: 59651 - DNA, 50 bp, synthetic construct
  source 1..50: mol_type = other DNA
attaagcgcctttgaagcttgctcatatgcgtgccgtcagtgtgcttaac

SEQ ID NO: 59652 - DNA, 50 bp, synthetic construct
  source 1..50: mol_type = other DNA
ctcgtttggctcgtttgggtcgtgtgcacgactcgaatgacccacgttgt

SEQ ID NO: 59653 - DNA, 50 bp, synthetic construct
  source 1..50: mol_type = other DNA
ttgtttcagaaaggcgacccagaatagtctacgtcgccagactgaactag

SEQ ID NO: 59654 - DNA, 50 bp, synthetic construct
  source 1..50: mol_type = other DNA
aagaaggtggagagtatcagataaaagcatatgatcgatataacttttga

SEQ ID NO: 59655 - DNA, 50 bp, synthetic construct
  source 1..50: mol_type = other DNA
tcttccttttgctggtagcttccagcggtaatatagaatcaaaaggagga

SEQ ID NO: 59656 - DNA, 50 bp, synthetic construct
  source 1..50: mol_type = other DNA
gtttcctctcgttggacgcaaagaggacttaacgtccaacaaaaggagta

SEQ ID NO: 59657 - DNA, 50 bp, synthetic construct
  source 1..50: mol_type = other DNA
ccggatacagtaaagttgaactgatttcccattaaccattttatagccga

SEQ ID NO: 59658 - DNA, 50 bp, synthetic construct
  source 1..50: mol_type = other DNA
tgttttcagtcaactctttttcttttctgaagtagagttagatgaacaaa

SEQ ID NO: 59659 - DNA, 50 bp, synthetic construct
  source 1..50: mol_type = other DNA
agcggcagccgatcagtcgcgggccggtcggcgagccgacggcggccacc

SEQ ID NO: 59660 - DNA, 50 bp, synthetic construct
  source 1..50: mol_type = other DNA
taggacactgtcctaattgacaaatttgcttcaattaaatcggtaacctt

SEQ ID NO: 59661 - DNA, 50 bp, synthetic construct
  source 1..50: mol_type = other DNA
cgggcattgaaacccccgatgacaagaatctgaatgactgataagccccg

SEQ ID NO: 59662 - DNA, 50 bp, synthetic construct
  source 1..50: mol_type = other DNA
ggtatttcaattggtcacaatatattattattatgaccaattgtaaaccc

SEQ ID NO: 59663 - DNA, 50 bp, synthetic construct
  source 1..50: mol_type = other DNA
tcaggtgtattatctaggcctgtttcaaccaggaccgatcgcgggcctcg

SEQ ID NO: 59664 - DNA, 50 bp, synthetic construct
  source 1..50: mol_type = other DNA
ctcggagaaatggtttacctaatcatggtcaggtgatatgatttaccgag

SEQ ID NO: 59665 - DNA, 50 bp, synthetic construct
  source 1..50: mol_type = other DNA
gcaacattgtgtgttcttcaccacaaatggtgatgaacacatattgaact

SEQ ID NO: 59666 - DNA, 50 bp, synthetic construct
  source 1..50: mol_type = other DNA
agaccgccagtaagagggtagattctaatataccctctatgggaaaagtg

SEQ ID NO: 59667 - DNA, 50 bp, synthetic construct
  source 1..50: mol_type = other DNA
tcaacccattcacaaaggagaggtgcgccttgccgtccaccatggcaatg

SEQ ID NO: 59668 - DNA, 50 bp, synthetic construct
  source 1..50: mol_type = other DNA
ccgagcacgagcgagacggacaccacctcgtcccactcgccctcgtgagt

SEQ ID NO: 59669 - DNA, 50 bp, synthetic construct
  source 1..50: mol_type = other DNA
tcgccgacgtcgcggccgtcttcggcccctcacggcccacacgcgggcac

SEQ ID NO: 59670 - DNA, 50 bp, synthetic construct
  source 1..50: mol_type = other DNA
actcaatgcattttgttttgcatccatctcataaaaaaaatcacttgggt

SEQ ID NO: 59671 - DNA, 50 bp, synthetic construct
  source 1..50: mol_type = other DNA
gattcttttctgttccataattctaattaacatcatccctgaaaagtatc

SEQ ID NO: 59672 - DNA, 50 bp, synthetic construct
  source 1..50: mol_type = other DNA
tgcagttttcatttcttaaaattttgatccatcaatcggtgaattctgtc

SEQ ID NO: 59673 - DNA, 50 bp, synthetic construct
  source 1..50: mol_type = other DNA
ctgcaaggtcgaatcttacaggtattaacctgtaattttttgggtaggtc

SEQ ID NO: 59674 - DNA, 50 bp, synthetic construct
  source 1..50: mol_type = other DNA
gtggaaccaataacatagcacgtctggatatgctctgtaaaaggttccat

SEQ ID NO: 59675 - DNA, 50 bp, synthetic construct
  source 1..50: mol_type = other DNA
tcactgcataactttaaattcagcctacgggagtgtaagatatgcagtgg

SEQ ID NO: 59676 - DNA, 50 bp, synthetic construct
  source 1..50: mol_type = other DNA
cggctcgaagccgtatagtataggaaagtatactcatcgctttggtcact

SEQ ID NO: 59677 - DNA, 50 bp, synthetic construct
  source 1..50: mol_type = other DNA
gtgtgagaatactaccaacctttctcgaagggtaggggtgtttgtcaaac

SEQ ID NO: 59678 - DNA, 50 bp, synthetic construct
  source 1..50: mol_type = other DNA
gaagtggtgacgaacctttccgcctatactcaagataccttcaacgttat

SEQ ID NO: 59679 - DNA, 50 bp, synthetic construct
  source 1..50: mol_type = other DNA
gtgtggaataaccccctaccattcgagagcggtagctgctattctcacac

SEQ ID NO: 59680 - DNA, 50 bp, synthetic construct
  source 1..50: mol_type = other DNA
ttggttcctatagcttaacacggctggctctaatctgtgataggtacaga

SEQ ID NO: 59681 - DNA, 50 bp, synthetic construct
  source 1..50: mol_type = other DNA
ggtaggtatttgtggcagaaattcaagaagtgttgttacaattacctacc

SEQ ID NO: 59682 - DNA, 50 bp, synthetic construct
  source 1..50: mol_type = other DNA
ctaagtataacgttattcctgttaattaacaggaataaaatggaacctct

SEQ ID NO: 59683 - DNA, 50 bp, synthetic construct
  source 1..50: mol_type = other DNA
aaaactttgtttaatgtttaatgtataccatatactttatacaaactttt

SEQ ID NO: 59684 - DNA, 50 bp, synthetic construct
  source 1..50: mol_type = other DNA
tcgccgaatagctcaaatacaatgacccttggatataggctattcgggtt

SEQ ID NO: 59685 - DNA, 50 bp, synthetic construct
  source 1..50: mol_type = other DNA
gttatcaattggaaaatataaataattctcactcttttctatctcatact

SEQ ID NO: 59686 - DNA, 50 bp, synthetic construct
  source 1..50: mol_type = other DNA
ttaagtttatctttgagagttacctgactaaggtaaggtggctaacttca

SEQ ID NO: 59687 - DNA, 50 bp, synthetic construct
  source 1..50: mol_type = other DNA
ttggacaaaagtgctaccgtctcgacatttaacgtggcatgactgatgaa

SEQ ID NO: 59688 - DNA, 50 bp, synthetic construct
  source 1..50: mol_type = other DNA
atttcactctttgtatcaacgctatgttgaataggaacataatttattaa

SEQ ID NO: 59689 - DNA, 50 bp, synthetic construct
  source 1..50: mol_type = other DNA
aaacaaccaaagattattaaaaagaaaagtttagccttcgggcttttctt

SEQ ID NO: 59690 - DNA, 50 bp, synthetic construct
  source 1..50: mol_type = other DNA
tatcgtcctgttaaagtatagccctcgggattgactttgtcaagatgatt

SEQ ID NO: 59691 - DNA, 50 bp, synthetic construct
  source 1..50: mol_type = other DNA
gccatttttttaaacatatataatccatttttacattatcaagaggtgca

SEQ ID NO: 59692 - DNA, 50 bp, synthetic construct
  source 1..50: mol_type = other DNA
tattttgtgccatagtcacctaccttcgtaggtgatttaataatagattt

SEQ ID NO: 59693 - DNA, 50 bp, synthetic construct
  source 1..50: mol_type = other DNA
ttaaggtttttagtcaaagctgttttaatatctttgactaaaaactttat

SEQ ID NO: 59694 - DNA, 50 bp, synthetic construct
  source 1..50: mol_type = other DNA
aacaaaaagcacacgtgatttatcttctcgaagataacaaccttttatat

SEQ ID NO: 59695 - DNA, 50 bp, synthetic construct
  source 1..50: mol_type = other DNA
gacttttagagatgttcaatttttttgaagaaggggaatttctatgttta

SEQ ID NO: 59696 - DNA, 50 bp, synthetic construct
  source 1..50: mol_type = other DNA
attgggtataaaaataatcatcattagtatttcccttttttttattctat

SEQ ID NO: 59697 - DNA, 50 bp, synthetic construct
  source 1..50: mol_type = other DNA
gcatatttatcctcggcttcttcaattgaagaattcattaataaataaag

SEQ ID NO: 59698 - DNA, 50 bp, synthetic construct
  source 1..50: mol_type = other DNA
ttttataataatatatatgtaatatatctttataagtaattatagataaa

SEQ ID NO: 59699 - DNA, 50 bp, synthetic construct
  source 1..50: mol_type = other DNA
atgctaaaaaaatagttaaaatgaatatatttagttgtagttagtacaat

SEQ ID NO: 59700 - DNA, 50 bp, synthetic construct
  source 1..50: mol_type = other DNA
tcttgaattttcgtgtaacgccaagtcgaatcactggcgagaattcaatc

SEQ ID NO: 59701 - DNA, 50 bp, synthetic construct
  source 1..50: mol_type = other DNA
aaaagagttgttatgagtcgattgtataatataagcaccataattctttt

SEQ ID NO: 59702 - DNA, 50 bp, synthetic construct
  source 1..50: mol_type = other DNA
tttttgcaaatactacacatctcaaatgtgatgtgtagtatttgcaaatt

SEQ ID NO: 59703 - DNA, 50 bp, synthetic construct
  source 1..50: mol_type = other DNA
cagcctaactgtattcatttgatgtacaacaaaagagcacagcgtgtata

SEQ ID NO: 59704 - DNA, 50 bp, synthetic construct
  source 1..50: mol_type = other DNA
tctcccatttccgctttactatcactaactagtaaagcgtcatcttgacc

SEQ ID NO: 59705 - DNA, 50 bp, synthetic construct
  source 1..50: mol_type = other DNA
tgtttgtaaatactacacatcacaaatgtgatgtgtagtgtttgcaaatg

SEQ ID NO: 59706 - DNA, 50 bp, synthetic construct
  source 1..50: mol_type = other DNA
caaaatggttgttatacctgatgttaccattttgcaacccaaaagtgttt

SEQ ID NO: 59707 - DNA, 50 bp, synthetic construct
  source 1..50: mol_type = other DNA
agaaatattaatatttataattcttaaaccttaaaaatgttaaaattaat

SEQ ID NO: 59708 - DNA, 50 bp, synthetic construct
  source 1..50: mol_type = other DNA
ttaatagccaatatctttttcgtggagacgaatcgcaagaatagtaccca

SEQ ID NO: 59709 - DNA, 50 bp, synthetic construct
  source 1..50: mol_type = other DNA
ataggaactttaatacatttatctgaatatatatatatcaaagtataact

SEQ ID NO: 59710 - DNA, 50 bp, synthetic construct
  source 1..50: mol_type = other DNA
atttatgtgcggatgaaactcttatggaacggtttactattctcgtatag

SEQ ID NO: 59711 - DNA, 50 bp, synthetic construct
  source 1..50: mol_type = other DNA
aacgttatttaatacaattaagttataatttattccactttctattcgta

SEQ ID NO: 59712 - DNA, 50 bp, synthetic construct
  source 1..50: mol_type = other DNA
taatttattttttgattattagggcaccctaatgatataaatccaatctt

SEQ ID NO: 59713 - DNA, 50 bp, synthetic construct
  source 1..50: mol_type = other DNA
ataggatagagaatggaatagcagttcacctataccagtctctgtccatt

SEQ ID NO: 59714 - DNA, 50 bp, synthetic construct
  source 1..50: mol_type = other DNA
ctgattttattgagggccacattcagcaagatggcagttaataaaaatgt

SEQ ID NO: 59715 - DNA, 50 bp, synthetic construct
  source 1..50: mol_type = other DNA
ctcttttcagttcctctaaactgctattagataatggaaagaaaaaagag

SEQ ID NO: 59716 - DNA, 50 bp, synthetic construct
  source 1..50: mol_type = other DNA
ataatctcgaccagatatggggagaagtccgtgaatcaaatcatcgttat

SEQ ID NO: 59717 - DNA, 50 bp, synthetic construct
  source 1..50: mol_type = other DNA
tcaaaaggacaagaggttcaatgggtacatgaaagctgttatctattgcc

SEQ ID NO: 59718 - DNA, 50 bp, synthetic construct
  source 1..50: mol_type = other DNA
gttatgagtttcaaatggcttattataaaaaactaatggaagggcagaag

SEQ ID NO: 59719 - DNA, 50 bp, synthetic construct
  source 1..50: mol_type = other DNA
gcattgtgaataaaacttagaaattaatttacaaaattatttatcattat

SEQ ID NO: 59720 - DNA, 50 bp, synthetic construct
  source 1..50: mol_type = other DNA
gctcgaataggtgacattaatgacttttcgttaaactgaccttatggcaa

SEQ ID NO: 59721 - DNA, 50 bp, synthetic construct
  source 1..50: mol_type = other DNA
aaagtgagtttagattgtatcagaattctgatacaatcaacgtttcctta

SEQ ID NO: 59722 - DNA, 50 bp, synthetic construct
  source 1..50: mol_type = other DNA
ccgctgggccatcatccgggcaatggctctcctccatgcgcctcctgccc

SEQ ID NO: 59723 - DNA, 50 bp, synthetic construct
  source 1..50: mol_type = other DNA
cggacggcctgcggatggagctggaggcagcccgacgccagagccgtccc

SEQ ID NO: 59724 - DNA, 50 bp, synthetic construct
  source 1..50: mol_type = other DNA
tatggcttatgctacctcgccgaatattcggtttttaggtatctggcgtt

SEQ ID NO: 59725 - DNA, 50 bp, synthetic construct
  source 1..50: mol_type = other DNA
cggacggaagagcgcgcggcggccggcgcgacttgacgccattccgcccg

SEQ ID NO: 59726 - DNA, 50 bp, synthetic construct
  source 1..50: mol_type = other DNA
cgcaaaccatcgcattagtgaactataaatcaatcatgaaaaatattccg

SEQ ID NO: 59727 - DNA, 50 bp, synthetic construct
  source 1..50: mol_type = other DNA
tttgccgttgaaggcgatctttgatttcaaaagataacctcacccatcaa

SEQ ID NO: 59728 - DNA, 50 bp, synthetic construct
  source 1..50: mol_type = other DNA
ataacctccaacaacctaagatggcaagtattgtatttgtaaagggttcg

SEQ ID NO: 59729 - DNA, 50 bp, synthetic construct
  source 1..50: mol_type = other DNA
tggtataatactaattgtagcttaacccagaaaggattgatattatgcga

SEQ ID NO: 59730 - DNA, 50 bp, synthetic construct
  source 1..50: mol_type = other DNA
ccgcctggtttagaagctaaatcaattactttatcttcactctattttat

SEQ ID NO: 59731 - DNA, 50 bp, synthetic construct
  source 1..50: mol_type = other DNA
gccaataaaaatagaaagattacaaatgttaattttctatttttactcgg

SEQ ID NO: 59732 - DNA, 50 bp, synthetic construct
  source 1..50: mol_type = other DNA
gtgattgaatggcaatcaataatacatcttcggagcagccttgcaagaga

SEQ ID NO: 59733 - DNA, 50 bp, synthetic construct
  source 1..50: mol_type = other DNA
aaaatataatcactattaaatttatataaagatatagagaaatatattga

SEQ ID NO: 59734 - DNA, 50 bp, synthetic construct
  source 1..50: mol_type = other DNA
tgtgtttaaacctttgggaacagtgtactgaccaaaaaggaggtgagacg

SEQ ID NO: 59735 - DNA, 50 bp, synthetic construct
  source 1..50: mol_type = other DNA
tccattattgagtgctataccgatgaatatgtatatagtttgattaggga

SEQ ID NO: 59736 - DNA, 50 bp, synthetic construct
  source 1..50: mol_type = other DNA
ccgaggatcagcgagcggaacagccggcagtcgccaatgcgttccgcgac

SEQ ID NO: 59737 - DNA, 50 bp, synthetic construct
  source 1..50: mol_type = other DNA
accccgccacggcatcgcggccggcgccggctgcgcgatgcgggcctgat

SEQ ID NO: 59738 - DNA, 50 bp, synthetic construct
  source 1..50: mol_type = other DNA
cgagagatgccccggccctgcggggcctcgcgctgccggccgagctcggc

SEQ ID NO: 59739 - DNA, 50 bp, synthetic construct
  source 1..50: mol_type = other DNA
aaaaagagatggttcaggcttcccaatccaatagttaaccatttgtattt

SEQ ID NO: 59740 - DNA, 50 bp, synthetic construct
  source 1..50: mol_type = other DNA
agccgatagcaaggagatgatcgcgctcgatctcgggcaggtaaataatg

SEQ ID NO: 59741 - DNA, 50 bp, synthetic construct
  source 1..50: mol_type = other DNA
aattactgaaatcatcattgcttttggtggaaatgtaggttactaaaatt

SEQ ID NO: 59742 - DNA, 50 bp, synthetic construct
  source 1..50: mol_type = other DNA
tccggttgctgtagtgtgcagtagcacaactgcgcaaaacaaaggagctt

SEQ ID NO: 59743 - DNA, 50 bp, synthetic construct
  source 1..50: mol_type = other DNA
ttatcaatagagccagaacatacccgtttctattcttcctcttgtcctaa

SEQ ID NO: 59744 - DNA, 50 bp, synthetic construct
  source 1..50: mol_type = other DNA
ttcggcttttctactaagaatagctcgcagtttttgggggaaatgccgta

SEQ ID NO: 59745 - DNA, 50 bp, synthetic construct
  source 1..50: mol_type = other DNA
gaattggcatcggtgcctaacacgacaagcctaggctcatccctagcttg

SEQ ID NO: 59746 - DNA, 50 bp, synthetic construct
  source 1..50: mol_type = other DNA
gtattttaatgacaatcataaaatcaattaaaccattctctttgtcttat

SEQ ID NO: 59747 - DNA, 50 bp, synthetic construct
  source 1..50: mol_type = other DNA
agtccagctagcatgtagaagtaacaaagcttctttatgagcatattctt

SEQ ID NO: 59748 - DNA, 50 bp, synthetic construct
  source 1..50: mol_type = other DNA
tatattgtcacaaaagcaattgctaggtttattatcaagaatacttcatg

SEQ ID NO: 59749 - DNA, 50 bp, synthetic construct
  source 1..50: mol_type = other DNA
ttggggaattgctgagacaaagggtacccattttatcattttttaggaaa

SEQ ID NO: 59750 - DNA, 50 bp, synthetic construct
  source 1..50: mol_type = other DNA
gtgtagtaaaaatataatttcacttttgtgaaatttattttttactacat

SEQ ID NO: 59751 - DNA, 50 bp, synthetic construct
  source 1..50: mol_type = other DNA
agtttggacaaaagtgctaccgtctcaacgtgttcatcgttgtccaaacc

SEQ ID NO: 59752 - DNA, 50 bp, synthetic construct
  source 1..50: mol_type = other DNA
tagctgtctggagctttgtgggtcttattgtccaaactcgatgtcgataa

SEQ ID NO: 59753 - DNA, 50 bp, synthetic construct
  source 1..50: mol_type = other DNA
atagcaagttctcacctacttgaaatataacaagggtaataatttggaga

SEQ ID NO: 59754 - DNA, 50 bp, synthetic construct
  source 1..50: mol_type = other DNA
cctttgcaatcactacacatcacatttgagatgtgtagggattgcaaaaa

SEQ ID NO: 59755 - DNA, 50 bp, synthetic construct
  source 1..50: mol_type = other DNA
tttctgtacgttcgaggaccgtaacatttcaacaccgtcactgactcaac

SEQ ID NO: 59756 - DNA, 50 bp, synthetic construct
  source 1..50: mol_type = other DNA
ggaccgtaacactctccacatgcgtcaacatgccacgaccttatgttgtc

SEQ ID NO: 59757 - DNA, 50 bp, synthetic construct
  source 1..50: mol_type = other DNA
ttaaggataatgatacttacaaaatactatgaaagtagcgttatatgtaa

SEQ ID NO: 59758 - DNA, 50 bp, synthetic construct
  source 1..50: mol_type = other DNA
ctttcaaaaaacctatacagacgagaaatactggattaataacttgataa

SEQ ID NO: 59759 - DNA, 50 bp, synthetic construct
  source 1..50: mol_type = other DNA
gtggtatctttatctaagtgaaccccgtttcccttagttaaagatattgt

SEQ ID NO: 59760 - DNA, 50 bp, synthetic construct
  source 1..50: mol_type = other DNA
aattagatttaccccatttaatcctaggaataaatggattggaattacta

SEQ ID NO: 59761 - DNA, 50 bp, synthetic construct
  source 1..50: mol_type = other DNA
ccaactcaaacctacgctttactatcaaaataagaaaattgtacatttaa

SEQ ID NO: 59762 - DNA, 50 bp, synthetic construct
  source 1..50: mol_type = other DNA
tttagcttcacacagcactcaacatgtggagactactatgtgtagatact

SEQ ID NO: 59763 - DNA, 50 bp, synthetic construct
  source 1..50: mol_type = other DNA
taaaagagtgttgggattgtattgtaggtcctcgggtacgcacaaaagta

SEQ ID NO: 59764 - DNA, 50 bp, synthetic construct
  source 1..50: mol_type = other DNA
atttaacctctgttatcagatttgtacaaatctgataataaattataaat

SEQ ID NO: 59765 - DNA, 50 bp, synthetic construct
  source 1..50: mol_type = other DNA
agaattataaattatttcatcttccaataaatgttataattgttatgtaa

SEQ ID NO: 59766 - DNA, 50 bp, synthetic construct
  source 1..50: mol_type = other DNA
cataactatttgaaaccactaggagttccaggtgtctttaaacggttatg

SEQ ID NO: 59767 - DNA, 50 bp, synthetic construct
  source 1..50: mol_type = other DNA
atggttataagatattaagattagtatatattataaatttgattagatat

SEQ ID NO: 59768 - DNA, 50 bp, synthetic construct
  source 1..50: mol_type = other DNA
tatttacatcattttttgcctctattaagaggcaaaaaacagctttggga

SEQ ID NO: 59769 - DNA, 50 bp, synthetic construct
  source 1..50: mol_type = other DNA
attaaataataaaaacctcacttaaataacggaggtttttacattattag

SEQ ID NO: 59770 - DNA, 50 bp, synthetic construct
  source 1..50: mol_type = other DNA
agttatattttaatacatatatcttcagataaatgtattaaagttcctat

SEQ ID NO: 59771 - DNA, 50 bp, synthetic construct
  source 1..50: mol_type = other DNA
aaaaaagaagcggctgtttgatttataaatcataaaagagagcctccggg

SEQ ID NO: 59772 - DNA, 50 bp, synthetic construct
  source 1..50: mol_type = other DNA
tcggcgctggcctgcgccttgggcgcctgtaagtcgctggaaagcgacgg

SEQ ID NO: 59773 - DNA, 50 bp, synthetic construct
  source 1..50: mol_type = other DNA
tgccggggcggaccatccgttggcgcgccacaggaaccagcgcccatgcg

SEQ ID NO: 59774 - DNA, 50 bp, synthetic construct
  source 1..50: mol_type = other DNA
tcccggttttataccgaagtggcggaagccgacgaaacagagaactacac

SEQ ID NO: 59775 - DNA, 50 bp, synthetic construct
  source 1..50: mol_type = other DNA
tgagtcgtgaccctataacagcagtacatgttttgctgggtgccgctggt

SEQ ID NO: 59776 - DNA, 50 bp, synthetic construct
  source 1..50: mol_type = other DNA
tgggtgtaataactaacattcgagtactcgaatgtagtggtttacaccat

SEQ ID NO: 59777 - DNA, 50 bp, synthetic construct
  source 1..50: mol_type = other DNA
ttatagtaagtaagaaagtaaagtatactagaaccacaaagagctaacaa

SEQ ID NO: 59778 - DNA, 50 bp, synthetic construct
  source 1..50: mol_type = other DNA
gctgatttaattacgtactttacatttgtgaaatacgtaatgttgtttaa

SEQ ID NO: 59779 - DNA, 50 bp, synthetic construct
  source 1..50: mol_type = other DNA
tttgggtaaggctatcgtggtaccccgcaccatcgctcctaacaacctag

SEQ ID NO: 59780 - DNA, 50 bp, synthetic construct
  source 1..50: mol_type = other DNA
gaatgatctttcaaacgatccaaatgctcggatgcttaacgagagcattc

SEQ ID NO: 59781 - DNA, 50 bp, synthetic construct
  source 1..50: mol_type = other DNA
gagttgatccagaaagagaaggaaaaaggagtgaggacatggaacaactg

SEQ ID NO: 59782 - DNA, 50 bp, synthetic construct
  source 1..50: mol_type = other DNA
ggacatacttagttttatagctctactaagcccacaaacttttagacaaa

SEQ ID NO: 59783 - DNA, 50 bp, synthetic construct
  source 1..50: mol_type = other DNA
tgtggttctagtatgtaagatgtgttaatctccgagatactagagcccca

SEQ ID NO: 59784 - DNA, 50 bp, synthetic construct
  source 1..50: mol_type = other DNA
ggcgcagtgtgatcacgttgcccgcgaggccaacctcccgctggtgcgct

SEQ ID NO: 59785 - DNA, 50 bp, synthetic construct
  source 1..50: mol_type = other DNA
cattctctcgactttagtccaatgatcgtcgcacgaacatcgccagaatg

SEQ ID NO: 59786 - DNA, 50 bp, synthetic construct
  source 1..50: mol_type = other DNA
cttggcaggcctttctttgaaggaagataatgccctgaattcgttgatat

SEQ ID NO: 59787 - DNA, 50 bp, synthetic construct
  source 1..50: mol_type = other DNA
actaacctcccaaaataaggcttatacaagcctaaattagcttctttatt

SEQ ID NO: 59788 - DNA, 50 bp, synthetic construct
  source 1..50: mol_type = other DNA
caaatccccaaaatcaatgctatggtaatagcagaaaaattaaatattac

SEQ ID NO: 59789 - DNA, 50 bp, synthetic construct
  source 1..50: mol_type = other DNA
cctatagccgaaaagttgaacgatatatcccacaacatttatcaatcaaa

SEQ ID NO: 59790 - DNA, 50 bp, synthetic construct
  source 1..50: mol_type = other DNA
ataaaaccgcactcacattagttacgtatcataagtaaaggcggttttag

SEQ ID NO: 59791 - DNA, 50 bp, synthetic construct
  source 1..50: mol_type = other DNA
cgcggagcgcaggccggccccgtgagcccggaggcggccagcgcggcggc

SEQ ID NO: 59792 - DNA, 50 bp, synthetic construct
  source 1..50: mol_type = other DNA
tagcgtatttctgtattttagtcaaattagggaaaatgccacatacttga

SEQ ID NO: 59793 - DNA, 50 bp, synthetic construct
  source 1..50: mol_type = other DNA
cctttgctattaagtaacaatatcacagtattgtttcatatgtaaaaata

SEQ ID NO: 59794 - DNA, 50 bp, synthetic construct
  source 1..50: mol_type = other DNA
ctcctagaaaaccgaatagacttcattgtagctattcggcactgtagcat

SEQ ID NO: 59795 - DNA, 50 bp, synthetic construct
  source 1..50: mol_type = other DNA
ttggctgggtgctattttaaacattcattaaaaacgatttacccatcgaa

SEQ ID NO: 59796 - DNA, 50 bp, synthetic construct
  source 1..50: mol_type = other DNA
tcaagaagtaagagagttttttcgttctaaaaatctcaaatactatttcg

SEQ ID NO: 59797 - DNA, 50 bp, synthetic construct
  source 1..50: mol_type = other DNA
ctttctgcgattcgctgattacaagcttgataaacactgcttttagagtg

SEQ ID NO: 59798 - DNA, 50 bp, synthetic construct
  source 1..50: mol_type = other DNA
caggagtttatcataagagattcgtacaactctctaataactaacttcga

SEQ ID NO: 59799 - DNA, 50 bp, synthetic construct
  source 1..50: mol_type = other DNA
cggatcgttactggccgacagcatgcatgatcgcggcgatggccgacatc

SEQ ID NO: 59800 - DNA, 50 bp, synthetic construct
  source 1..50: mol_type = other DNA
ctttcatggatgtaaagataaactattgtctacttttacatccatcagat

SEQ ID NO: 59801 - DNA, 50 bp, synthetic construct
  source 1..50: mol_type = other DNA
aaaaaattgtaaaattattgtagttaactataaaaaggacggtcttttta

SEQ ID NO: 59802 - DNA, 50 bp, synthetic construct
  source 1..50: mol_type = other DNA
cccctaccgtgtcaacgtaaatcccgggcaggtcggtgacggggaccagg

SEQ ID NO: 59803 - DNA, 50 bp, synthetic construct
  source 1..50: mol_type = other DNA
aagtgtatgtagggctatcatagcaggcattcaggatgctaacatcacta

SEQ ID NO: 59804 - DNA, 50 bp, synthetic construct
  source 1..50: mol_type = other DNA
tttttgtgtagtgacaactaaagctcgcattagttgtcatatgaggtaaa

SEQ ID NO: 59805 - DNA, 50 bp, synthetic construct
  source 1..50: mol_type = other DNA
ctataatgactctatgaccagattataaccgattcatgtatctgttagca

SEQ ID NO: 59806 - DNA, 50 bp, synthetic construct
  source 1..50: mol_type = other DNA
ataacaaatttagatactcttgtttcaagtagcgtatctaaaactctcat

SEQ ID NO: 59807 - DNA, 50 bp, synthetic construct
  source 1..50: mol_type = other DNA
attgtaagatatagtaaaacgatgtactaaaattatttatattttccaat

SEQ ID NO: 59808 - DNA, 50 bp, synthetic construct
  source 1..50: mol_type = other DNA
aggctttaaagttagaacatataatcaaatatgtaaaataaagagagcct

SEQ ID NO: 59809 - DNA, 50 bp, synthetic construct
  source 1..50: mol_type = other DNA
cccggccaccaccctgcccggcacccgaacccagcaaggaggtgcaccat

SEQ ID NO: 59810 - DNA, 50 bp, synthetic construct
  source 1..50: mol_type = other DNA
caggtaaaagaattattttccggatatggggtttaccattttttcgcctt

SEQ ID NO: 59811 - DNA, 50 bp, synthetic construct
  source 1..50: mol_type = other DNA
tttttacagaaaagactaaaaaaattaggcttttctttttaccgaaaaaa

SEQ ID NO: 59812 - DNA, 50 bp, synthetic construct
  source 1..50: mol_type = other DNA
gagaagcgcccaggaaggtccacaatgttggatgttcaaaccctcgacat

SEQ ID NO: 59813 - DNA, 50 bp, synthetic construct
  source 1..50: mol_type = other DNA
taatattcattttcatcccccgttatatggagggatgaacatgtatacag

SEQ ID NO: 59814 - DNA, 50 bp, synthetic construct
  source 1..50: mol_type = other DNA
ttttatgctgaatagataaggataattactgctgtttatgttgaacaaag

SEQ ID NO: 59815 - DNA, 50 bp, synthetic construct
  source 1..50: mol_type = other DNA
cattttcttgaacataatttgattctctataatcaattctcagcccttca

SEQ ID NO: 59816 - DNA, 50 bp, synthetic construct
  source 1..50: mol_type = other DNA
agttttttattttctctgtccctaagatttgtcaaggacataaacaaaat

SEQ ID NO: 59817 - DNA, 50 bp, synthetic construct
  source 1..50: mol_type = other DNA
gaaaggttgatgaaatgatgagccatcaatgatcagcagatcaatcttag

SEQ ID NO: 59818 - DNA, 50 bp, synthetic construct
  source 1..50: mol_type = other DNA
ccgttttctcgcatcttttcccgcagcaggcagagtatgcttatagtctt

SEQ ID NO: 59819 - DNA, 50 bp, synthetic construct
  source 1..50: mol_type = other DNA
cgaattaaatttgtcaacgaagcatcatcttcggaaacagcttgcaagcg

SEQ ID NO: 59820 - DNA, 50 bp, synthetic construct
  source 1..50: mol_type = other DNA
tttaagtgataaccttagaagtgttaacacttctaaggttatcaacaaac

SEQ ID NO: 59821 - DNA, 50 bp, synthetic construct
  source 1..50: mol_type = other DNA
cactaatcgaaaaaatagatattgctgtcatgctattttttctcctctca

SEQ ID NO: 59822 - DNA, 50 bp, synthetic construct
  source 1..50: mol_type = other DNA
tctgttttggtttgtgttgttgttttaacaacaagctaattggaaacaaa

SEQ ID NO: 59823 - DNA, 50 bp, synthetic construct
  source 1..50: mol_type = other DNA
tcggtttcttcgccatgacgggttcggcccgttcattccgaacggcccga

SEQ ID NO: 59824 - DNA, 50 bp, synthetic construct
  source 1..50: mol_type = other DNA
actgtattcattttatcagatccttatatcattatggatatgggaacagt

SEQ ID NO: 59825 - DNA, 50 bp, synthetic construct
  source 1..50: mol_type = other DNA
aattacacatatatgatatatatttacattaataacgctcataggtaatt

SEQ ID NO: 59826 - DNA, 50 bp, synthetic construct
  source 1..50: mol_type = other DNA
tgattttgtttttgacaaaaaattcctctttttattgatacatttgataa

SEQ ID NO: 59827 - DNA, 50 bp, synthetic construct
  source 1..50: mol_type = other DNA
cgaccttctgccaatctagcgtcggagccggcctcataacctgaaggtcg

SEQ ID NO: 59828 - DNA, 50 bp, synthetic construct
  source 1..50: mol_type = other DNA
attccgtataataaatgtttgggcctgccttgacggtcatttaacagaac

SEQ ID NO: 59829 - DNA, 50 bp, synthetic construct
  source 1..50: mol_type = other DNA
gacgaactcacgaagcgctgtcgccggcggcagcgccatgacgatggcgt

SEQ ID NO: 59830 - DNA, 50 bp, synthetic construct
  source 1..50: mol_type = other DNA
ctttaacgttcaaccttgaaccagattcttgaaaaaagctaaggttaaag

SEQ ID NO: 59831 - DNA, 50 bp, synthetic construct
  source 1..50: mol_type = other DNA
tgtatcaattttagaactcacacttcggtgtgagttctcaatttgataca

SEQ ID NO: 59832 - DNA, 50 bp, synthetic construct
  source 1..50: mol_type = other DNA
agctactttatttgttgctatcatagatgagtgtcttttctatcttagca

SEQ ID NO: 59833 - DNA, 50 bp, synthetic construct
  source 1..50: mol_type = other DNA
acggataacccctttaaagagattcaaaagtgcttaagtcgggtaatgct

SEQ ID NO: 59834 - DNA, 50 bp, synthetic construct
  source 1..50: mol_type = other DNA
actttgaactatgtactattcatttgaatagtggcaacattgtacaaaaa

SEQ ID NO: 59835 - DNA, 50 bp, synthetic construct
  source 1..50: mol_type = other DNA
tttagcaggtgttaattgtgggtaaactactacaaagtacattggtaaag

SEQ ID NO: 59836 - DNA, 50 bp, synthetic construct
  source 1..50: mol_type = other DNA
gatgatgacggacttatcattgaaaactatatgataacctcatcaacatc

SEQ ID NO: 59837 - DNA, 50 bp, synthetic construct
  source 1..50: mol_type = other DNA
ttttacatttcatatctatatattagaatatagtgaaaattattgttata

SEQ ID NO: 59838 - DNA, 50 bp, synthetic construct
  source 1..50: mol_type = other DNA
tgttatcatagagttaataaatataaatatatattatctatatgttgtta

SEQ ID NO: 59839 - DNA, 50 bp, synthetic construct
  source 1..50: mol_type = other DNA
tgtaccccttttttgataaaataggtacgtttttcataaaaactgtaagg

SEQ ID NO: 59840 - DNA, 50 bp, synthetic construct
  source 1..50: mol_type = other DNA
ttgtatcaacgctatgcactcgacgtgtgttgtccataggataggaacac

SEQ ID NO: 59841 - DNA, 50 bp, synthetic construct
  source 1..50: mol_type = other DNA
gcattattgtcaaaaatgccattttgaaatgatagtccaaacttaaatta

SEQ ID NO: 59842 - DNA, 50 bp, synthetic construct
  source 1..50: mol_type = other DNA
ttagcgtttttagtgtcttgcattcaaatgcaagatactaaaattcttcc

SEQ ID NO: 59843 - DNA, 50 bp, synthetic construct
  source 1..50: mol_type = other DNA
tttctcttaaaaaatatcattatttgaatgatattaggaaaacttcataa

SEQ ID NO: 59844 - DNA, 50 bp, synthetic construct
  source 1..50: mol_type = other DNA
agtttggacaatgatgaacaagttgagacggtagcacttttgtccaaact

SEQ ID NO: 59845 - DNA, 50 bp, synthetic construct
  source 1..50: mol_type = other DNA
tagatagtttttcttcaatatcatccctatttatgataaagacctcccta

SEQ ID NO: 59846 - DNA, 50 bp, synthetic construct
  source 1..50: mol_type = other DNA
gaacgttgcacaaagtgattttctaaataaagtccgttaaaatttcgatt

SEQ ID NO: 59847 - DNA, 50 bp, synthetic construct
  source 1..50: mol_type = other DNA
tcattcccttctaaaatattttgtgtaaaaaatactaaagaaggcggtgg

SEQ ID NO: 59848 - DNA, 50 bp, synthetic construct
  source 1..50: mol_type = other DNA
tttgtattgttcaaagtattcaagtgcttgaatactatgcccatctatag

SEQ ID NO: 59849 - DNA, 50 bp, synthetic construct
  source 1..50: mol_type = other DNA
tccatgttacatatgaaattttctcaaaaaaagaacgtatgtgcgaaagg

SEQ ID NO: 59850 - DNA, 50 bp, synthetic construct
  source 1..50: mol_type = other DNA
gatttgaatttgtttgtatcatttcctaactctgataacaaagaaatatg

SEQ ID NO: 59851 - DNA, 50 bp, synthetic construct
  source 1..50: mol_type = other DNA
agtaagcaaatcagagaagaattgttttagtgaaagatgttttgcttaat

SEQ ID NO: 59852 - DNA, 50 bp, synthetic construct
  source 1..50: mol_type = other DNA
gaagatttaaatataagtttggacaagtccaaacttttttgggaatataa

SEQ ID NO: 59853 - DNA, 50 bp, synthetic construct
  source 1..50: mol_type = other DNA
gaaagtaattactattcaggctacactttttttgaaaaaaattccaaaat

SEQ ID NO: 59854 - DNA, 50 bp, synthetic construct
  source 1..50: mol_type = other DNA
tttaatgttaaaatacattcaaaaattagtggagtagatttatggttaaa

SEQ ID NO: 59855 - DNA, 50 bp, synthetic construct
  source 1..50: mol_type = other DNA
caaggagatagtgactatgggaaagagggagtagttttgctgaaagcttg

SEQ ID NO: 59856 - DNA, 50 bp, synthetic construct
  source 1..50: mol_type = other DNA
ttatggtacaaaagtaactaacattaatcttaataccttggatactaata

SEQ ID NO: 59857 - DNA, 50 bp, synthetic construct
  source 1..50: mol_type = other DNA
gatttagcggcttgtttttttacgttataaataaaaagtaacctgttttt

SEQ ID NO: 59858 - DNA, 50 bp, synthetic construct
  source 1..50: mol_type = other DNA
ttcatcttcgccatgggggtatattaatatgcccccatactcttgacggg

SEQ ID NO: 59859 - DNA, 50 bp, synthetic construct
  source 1..50: mol_type = other DNA
aagagagttttttcgtttctatcttgatttagataagataattttttata

SEQ ID NO: 59860 - DNA, 50 bp, synthetic construct
  source 1..50: mol_type = other DNA
tcatatctttaactaagggaaaccggagtttcccaaacaaaaggatatta

SEQ ID NO: 59861 - DNA, 50 bp, synthetic construct
  source 1..50: mol_type = other DNA
gaaaaatggcaaataagaaagtaaccacactttcttcttgcggatttttt

SEQ ID NO: 59862 - DNA, 50 bp, synthetic construct
  source 1..50: mol_type = other DNA
ttcttgtataattagcacaagaaaaagcaaagcacctattttgtgaataa

SEQ ID NO: 59863 - DNA, 50 bp, synthetic construct
  source 1..50: mol_type = other DNA
acagtaaaattcagtatatcatggtgaactgatggtggtaattaacagta

SEQ ID NO: 59864 - DNA, 50 bp, synthetic construct
  source 1..50: mol_type = other DNA
ggtttccaatgtacactgctggggtgatcgagcaatgcacctatgagaag

SEQ ID NO: 59865 - DNA, 50 bp, synthetic construct
  source 1..50: mol_type = other DNA
aaatcgtgctgcatgcggccctctgacaagggcagcatccatggcgaggt

SEQ ID NO: 59866 - DNA, 50 bp, synthetic construct
  source 1..50: mol_type = other DNA
acaagtcgttcgactcatccccttcaacgtcgataagttgcctaacacct

SEQ ID NO: 59867 - DNA, 50 bp, synthetic construct
  source 1..50: mol_type = other DNA
tcggactatgcaagtggtagcggaggagcgctaccgcttggacagtccgg

SEQ ID NO: 59868 - DNA, 50 bp, synthetic construct
  source 1..50: mol_type = other DNA
ccacggaaacctgggcggcgatggcgccaggtgtcctcatgattgccatt

SEQ ID NO: 59869 - DNA, 50 bp, synthetic construct
  source 1..50: mol_type = other DNA
tttatatttgaagggcttatagagcgtagctaaagcccttgagattaagg

SEQ ID NO: 59870 - DNA, 50 bp, synthetic construct
  source 1..50: mol_type = other DNA
ggccatacaccctttggctatcggattgcattctcaagcactggatggag

SEQ ID NO: 59871 - DNA, 50 bp, synthetic construct
  source 1..50: mol_type = other DNA
gtccggaccatggtcggtaatcgcaatacttcaccgactatgcccctatc

SEQ ID NO: 59872 - DNA, 50 bp, synthetic construct
  source 1..50: mol_type = other DNA
atatcagaatgtctcctttttcaagatatggttcggaggcattccttttt

SEQ ID NO: 59873 - DNA, 50 bp, synthetic construct
  source 1..50: mol_type = other DNA
tgtacccaaatatggtcggtatttttctccgccgattttgccgcttgagg

SEQ ID NO: 59874 - DNA, 50 bp, synthetic construct
  source 1..50: mol_type = other DNA
acgaaatctacgagatcggcattggcgaatgatgatcaggaagctttcgg

SEQ ID NO: 59875 - DNA, 50 bp, synthetic construct
  source 1..50: mol_type = other DNA
gcatatagaccttgataatactggatagggtaatactaatcagacacgtt

SEQ ID NO: 59876 - DNA, 50 bp, synthetic construct
  source 1..50: mol_type = other DNA
aggtaattccgtaaccccagcataattttatcattttttaggaaattttg

SEQ ID NO: 59877 - DNA, 50 bp, synthetic construct
  source 1..50: mol_type = other DNA
aaagggtataaaaagaaagcccgttgcgacgctggaatcatatatccacg

SEQ ID NO: 59878 - DNA, 50 bp, synthetic construct
  source 1..50: mol_type = other DNA
cagacaaaggaaagcgtatagatgcatacctatacggggcagccgatcca

SEQ ID NO: 59879 - DNA, 50 bp, synthetic construct
  source 1..50: mol_type = other DNA
gtaaaaccaaccgtacacatatacaagcatgtttgctcggtggcgatagc

SEQ ID NO: 59880 - DNA, 50 bp, synthetic construct
  source 1..50: mol_type = other DNA
ctattacttctttatcacacgtaagctcatgtgcggtaaagtaacacaca

SEQ ID NO: 59881 - DNA, 50 bp, synthetic construct
  source 1..50: mol_type = other DNA
gagagcctttttacgtaagcaccttaaggtgcttgataataattgtgatt

SEQ ID NO: 59882 - DNA, 50 bp, synthetic construct
  source 1..50: mol_type = other DNA
ggtcgtcgagggtttgagaagcaagttcgttgttcaaaccggcgaccttc

SEQ ID NO: 59883 - DNA, 50 bp, synthetic construct
  source 1..50: mol_type = other DNA
cggcttccaccgatgtcaggtgttctcaaaccgaacacctggcagcgatt

SEQ ID NO: 59884 - DNA, 50 bp, synthetic construct
  source 1..50: mol_type = other DNA
ggacgcttctggccgacgatgcggccccagatcaacttgggattcgaccc

SEQ ID NO: 59885 - DNA, 50 bp, synthetic construct
  source 1..50: mol_type = other DNA
cataccttaggtccttttttcctattttttagaaaaggagcgacaatatg

SEQ ID NO: 59886 - DNA, 50 bp, synthetic construct
  source 1..50: mol_type = other DNA
ctttttaaccgaggtcttggccatcatcggcataaatgccggcaaattca

SEQ ID NO: 59887 - DNA, 50 bp, synthetic construct
  source 1..50: mol_type = other DNA
tatggcatatcttaaagaaaattttgacttttttcagaaaatatgctata

SEQ ID NO: 59888 - DNA, 50 bp, synthetic construct
  source 1..50: mol_type = other DNA
tccgctgacgcacctttccaaggtggaggatgtaaaggggcgtgggatgt

SEQ ID NO: 59889 - DNA, 50 bp, synthetic construct
  source 1..50: mol_type = other DNA
taaaatccgtgatatctctgaataactattccctcttataatggattttc

SEQ ID NO: 59890 - DNA, 50 bp, synthetic construct
  source 1..50: mol_type = other DNA
atgtaaaaatggatgtttaaaaataatcgtttgaatatcaatttgaacat

SEQ ID NO: 59891 - DNA, 50 bp, synthetic construct
  source 1..50: mol_type = other DNA
attgcagtcctcgtcggagcagaaatttattaagcgatgagttatataat

SEQ ID NO: 59892 - DNA, 50 bp, synthetic construct
  source 1..50: mol_type = other DNA
gtgccgtaaacgcttctctggcgaagcgcccgtgcatctttcagacgcac

SEQ ID NO: 59893 - DNA, 50 bp, synthetic construct
  source 1..50: mol_type = other DNA
gctattattcctttcttgcaaggtataataaggaagaaaggagagtggga

SEQ ID NO: 59894 - DNA, 50 bp, synthetic construct
  source 1..50: mol_type = other DNA
ctatgtcggcaactctgcaaacatttattccagcaaagaaaacgatacaa

SEQ ID NO: 59895 - DNA, 50 bp, synthetic construct
  source 1..50: mol_type = other DNA
gtgtcggcgcacggcagtgcgccgagcgagagagtgccacagaaaagtaa

SEQ ID NO: 59896 - DNA, 50 bp, synthetic construct
  source 1..50: mol_type = other DNA
gaaattttccagaattttacgatgtaaatgatatcattcttcccatcgtc

SEQ ID NO: 59897 - DNA, 50 bp, synthetic construct
  source 1..50: mol_type = other DNA
cacgatacatctgaaagattcgtttaatacactataaatcttgtgtgctc

SEQ ID NO: 59898 - DNA, 50 bp, synthetic construct
  source 1..50: mol_type = other DNA
catgtcaataatggaaacatatcccgggaattttttacattattgacata

SEQ ID NO: 59899 - DNA, 50 bp, synthetic construct
  source 1..50: mol_type = other DNA
aactgattgtacaaaaaaatgtctaatgaacattttttaagctatgagca

SEQ ID NO: 59900 - DNA, 50 bp, synthetic construct
  source 1..50: mol_type = other DNA
cgctcgaggtgcagtccaccagcggacgcagtcccaccaaagcccgctaa

SEQ ID NO: 59901 - DNA, 50 bp, synthetic construct
  source 1..50: mol_type = other DNA
gccgttacattatcagtgaatcatggattgctgactgatataggcacgga

SEQ ID NO: 59902 - DNA, 50 bp, synthetic construct
  source 1..50: mol_type = other DNA
tccgcctgcttaaaaggatcatcaaaagatgatcctgaaaatcagtcacc

SEQ ID NO: 59903 - DNA, 50 bp, synthetic construct
  source 1..50: mol_type = other DNA
atagtaaagagccctactaaaagtaggcttattgtttggcttgtttttat

SEQ ID NO: 59904 - DNA, 50 bp, synthetic construct
  source 1..50: mol_type = other DNA
agctgattaatccacttcataatccagatgttgaggtggattaatttatg

SEQ ID NO: 59905 - DNA, 50 bp, synthetic construct
  source 1..50: mol_type = other DNA
caaaaaaggaggctttataactgctaaggccatcgaaacaggtttaccaa

SEQ ID NO: 59906 - DNA, 50 bp, synthetic construct
  source 1..50: mol_type = other DNA
ccggacgggtcgcgcgatgcggtccggccgccatctcctcgtcacgccgg

SEQ ID NO: 59907 - DNA, 50 bp, synthetic construct
  source 1..50: mol_type = other DNA
caccccgtcagctcgacgcagccgaacgggtacgtccggcgcgcggggca

SEQ ID NO: 59908 - DNA, 50 bp, synthetic construct
  source 1..50: mol_type = other DNA
tcattttgaaaaatggtaacaatgtacattattaccattgtgataaaata

SEQ ID NO: 59909 - DNA, 50 bp, synthetic construct
  source 1..50: mol_type = other DNA
tatatatttatgaatgaattgatatacatcattgagataatatatatttg

SEQ ID NO: 59910 - DNA, 50 bp, synthetic construct
  source 1..50: mol_type = other DNA
tgttgcaggaatttgggatttaagcgtttagcccgacgatcgctggcaca

SEQ ID NO: 59911 - DNA, 50 bp, synthetic construct
  source 1..50: mol_type = other DNA
ttatggctaatgctacaatgccgaattcggctttctttggatgttcacct

SEQ ID NO: 59912 - DNA, 50 bp, synthetic construct
  source 1..50: mol_type = other DNA
caattgtacgacgttaatttttaattaattcgtaaaacgtgctaccgatc

SEQ ID NO: 59913 - DNA, 50 bp, synthetic construct
  source 1..50: mol_type = other DNA
gatgccagataatctagttcagcgatctttaaatgagaatcaattgcatg

SEQ ID NO: 59914 - DNA, 50 bp, synthetic construct
  source 1..50: mol_type = other DNA
ctttaggtggtgtatttaaacgtgtcaaggtctaaatacactatgaggat

SEQ ID NO: 59915 - DNA, 50 bp, synthetic construct
  source 1..50: mol_type = other DNA
tcatattcaatacctaaaatgatgtgcttgacattagcctttgaaactgc

SEQ ID NO: 59916 - DNA, 50 bp, synthetic construct
  source 1..50: mol_type = other DNA
acccgttgcttcgttgtagcaacacttgagaatacaattttttatcctcg

SEQ ID NO: 59917 - DNA, 50 bp, synthetic construct
  source 1..50: mol_type = other DNA
ttattctatattggaataacttctctcggttgatatttgtcaacaaagtt

SEQ ID NO: 59918 - DNA, 50 bp, synthetic construct
  source 1..50: mol_type = other DNA
tttggtatctcgtttcttcttcttccaacgagagaaaacgaggtactaaa

SEQ ID NO: 59919 - DNA, 50 bp, synthetic construct
  source 1..50: mol_type = other DNA
cttaattggtgttacccataagccacgttttagaattttgtttaattttc

SEQ ID NO: 59920 - DNA, 50 bp, synthetic construct
  source 1..50: mol_type = other DNA
agaaaagccaggaggctttaattagtgattttaaataaagttgcttttct

SEQ ID NO: 59921 - DNA, 50 bp, synthetic construct
  source 1..50: mol_type = other DNA
attgaatggctctagtagcttgtttaaacatcctgataaatttcttctat

SEQ ID NO: 59922 - DNA, 50 bp, synthetic construct
  source 1..50: mol_type = other DNA
tttggtatctcgtttattcttcttccaacgagagaaaacgaggtactaaa

SEQ ID NO: 59923 - DNA, 50 bp, synthetic construct
  source 1..50: mol_type = other DNA
aatgtaaaagctttaaccttagcttttgacacggttatagctttcaatca

SEQ ID NO: 59924 - DNA, 50 bp, synthetic construct
  source 1..50: mol_type = other DNA
ttataacgataggggcatagtcggtgctcgctatgtccagcacgtttgcg

SEQ ID NO: 59925 - DNA, 50 bp, synthetic construct
  source 1..50: mol_type = other DNA
tctgtttttcctgtaagcaggaaagatttcccgtagttcggaaaatccct

SEQ ID NO: 59926 - DNA, 50 bp, synthetic construct
  source 1..50: mol_type = other DNA
attccagacttaaattaggaaaattcatttttttaaattaagtctgcaaa

SEQ ID NO: 59927 - DNA, 50 bp, synthetic construct
  source 1..50: mol_type = other DNA
tttctactaaacttcttctttcataattaaaacaagaaatttcatataag

SEQ ID NO: 59928 - DNA, 50 bp, synthetic construct
  source 1..50: mol_type = other DNA
ttgcatcattcagtctgtcattcatttaaatatgagactcaatgatttag

SEQ ID NO: 59929 - DNA, 50 bp, synthetic construct
  source 1..50: mol_type = other DNA
cggcgcaccgttgccgtccaccgcgagcggtgggcggccctgggggaact

SEQ ID NO: 59930 - DNA, 50 bp, synthetic construct
  source 1..50: mol_type = other DNA
cgtggtcgtagtatcaaatacaacagcataaccttgacagtagaactata

SEQ ID NO: 59931 - DNA, 50 bp, synthetic construct
  source 1..50: mol_type = other DNA
ccagaactactagtctggagccttcggaggctcgtgacttccagttctag

SEQ ID NO: 59932 - DNA, 50 bp, synthetic construct
  source 1..50: mol_type = other DNA
ttgcgcttgacccgcttggatatgcgctggtcgggacgaaagaaacgttc

SEQ ID NO: 59933 - DNA, 50 bp, synthetic construct
  source 1..50: mol_type = other DNA
aacattaattgtgagaaataaatttcaggtttttcaatgccagaatctgt

SEQ ID NO: 59934 - DNA, 50 bp, synthetic construct
  source 1..50: mol_type = other DNA
attttttaatttattttgatgttgatcaaaatttaattaagcctaaaaaa

SEQ ID NO: 59935 - DNA, 50 bp, synthetic construct
  source 1..50: mol_type = other DNA
gctggaccgcctggagcgcgccaaggatggcccgatgaagacggccgtga

SEQ ID NO: 59936 - DNA, 50 bp, synthetic construct
  source 1..50: mol_type = other DNA
ctgaatggctccctgagtaggattcgaatccgccttgatgaggcagaccg

SEQ ID NO: 59937 - DNA, 50 bp, synthetic construct
  source 1..50: mol_type = other DNA
ggtagccatttattgtatatcgcagatgtgatatatataaaagtgctact

SEQ ID NO: 59938 - DNA, 50 bp, synthetic construct
  source 1..50: mol_type = other DNA
ggttccaacaaatcacatctggcggtggcggtggcggccctgttgctaca

SEQ ID NO: 59939 - DNA, 50 bp, synthetic construct
  source 1..50: mol_type = other DNA
gaagttatcatccagacagcgaacatagtagctaacacctccaagcctta

SEQ ID NO: 59940 - DNA, 50 bp, synthetic construct
  source 1..50: mol_type = other DNA
cgagatgccggacggcctgaaaaagcactttcagaacagagtgcaaagga

SEQ ID NO: 59941 - DNA, 50 bp, synthetic construct
  source 1..50: mol_type = other DNA
ctttaaggtatgtatcatttacgcttttgttaacgatccggcgcttcttg

SEQ ID NO: 59942 - DNA, 50 bp, synthetic construct
  source 1..50: mol_type = other DNA
cgcagtgttcacggtggacacgctgcatagtgacgactgtgccgacttct

SEQ ID NO: 59943 - DNA, 50 bp, synthetic construct
  source 1..50: mol_type = other DNA
cctccggcgtcgggttcggccgggagcccggaacggattgacgccgggcc

SEQ ID NO: 59944 - DNA, 50 bp, synthetic construct
  source 1..50: mol_type = other DNA
caccattaggttgttagggtcaatgggggtaccacgattgccttacccaa

SEQ ID NO: 59945 - DNA, 50 bp, synthetic construct
  source 1..50: mol_type = other DNA
cctactctcccgtgccgtcgccagcgccggcgacatttctggcgatgccg

SEQ ID NO: 59946 - DNA, 50 bp, synthetic construct
  source 1..50: mol_type = other DNA
atattattcattatctttgcgctgttaatgcttgatataatgcttcagat

SEQ ID NO: 59947 - DNA, 50 bp, synthetic construct
  source 1..50: mol_type = other DNA
aaatctcgtcaatatacttgcacatatgtgcaagtatctatttgagttga

SEQ ID NO: 59948 - DNA, 50 bp, synthetic construct
  source 1..50: mol_type = other DNA
ccaacccccaaagatcgttaacgatacttttaatgaatcatggtaagaat

SEQ ID NO: 59949 - DNA, 50 bp, synthetic construct
  source 1..50: mol_type = other DNA
ggtgcagttttccatcgacggcgctgaggcaaccgatggatatcggccgt

SEQ ID NO: 59950 - DNA, 50 bp, synthetic construct
  source 1..50: mol_type = other DNA
gccatcggcatcagtctggtggtggccaccgagaaactcagcccttcacg

SEQ ID NO: 59951 - DNA, 50 bp, synthetic construct
  source 1..50: mol_type = other DNA
cgcccgcagaggtgcatcatccacagtcctggcccgcacgtctgcgggcc

SEQ ID NO: 59952 - DNA, 50 bp, synthetic construct
  source 1..50: mol_type = other DNA
ccttctccttttttgctataactttaaaaccagagcaaaaaaagagaatg

SEQ ID NO: 59953 - DNA, 50 bp, synthetic construct
  source 1..50: mol_type = other DNA
gtttgaatacgaccatctactccaatttaagatgaaggggggatataaat

SEQ ID NO: 59954 - DNA, 50 bp, synthetic construct
  source 1..50: mol_type = other DNA
accaccagatgtccctggccttcccaggaaggtcaggaaggcccggtcga

SEQ ID NO: 59955 - DNA, 50 bp, synthetic construct
  source 1..50: mol_type = other DNA
cggctaaattcctcgcgactaccatctttgtgtttaaaggcttttaatta

SEQ ID NO: 59956 - DNA, 50 bp, synthetic construct
  source 1..50: mol_type = other DNA
tgtaagaggctttttgttctttagtgtctgctattgtagtgctatctaca

SEQ ID NO: 59957 - DNA, 50 bp, synthetic construct
  source 1..50: mol_type = other DNA
acctttttctgagtttgagatttgaccgtatctaatcaacagtgctaggc

SEQ ID NO: 59958 - DNA, 50 bp, synthetic construct
  source 1..50: mol_type = other DNA
gtggcttcgtagatgaaagctatactcataatcttcatgttttaagatgt

SEQ ID NO: 59959 - DNA, 50 bp, synthetic construct
  source 1..50: mol_type = other DNA
tgctaagatagaaaagacactcatctatgataacaacaaataaagtagct

SEQ ID NO: 59960 - DNA, 50 bp, synthetic construct
  source 1..50: mol_type = other DNA
tgtatgagatagaaaagagtgagaattatttatattttccaattgataac

SEQ ID NO: 59961 - DNA, 50 bp, synthetic construct
  source 1..50: mol_type = other DNA
agctgtatacatattctgcttgtttaaacaatattaacatgagactagct

SEQ ID NO: 59962 - DNA, 50 bp, synthetic construct
  source 1..50: mol_type = other DNA
catattaatggacctaataaaggattgcaagcatatatagcatcgcattt

SEQ ID NO: 59963 - DNA, 50 bp, synthetic construct
  source 1..50: mol_type = other DNA
acctcacttcacttccagtatagcaatagaacgtacgtacgaaaggagaa

SEQ ID NO: 59964 - DNA, 50 bp, synthetic construct
  source 1..50: mol_type = other DNA
atattgatcttagtatttataacagttggaacaagtactaaaataaagtt

SEQ ID NO: 59965 - DNA, 50 bp, synthetic construct
  source 1..50: mol_type = other DNA
gcagtagacatcgtacatttaggggacgtcaaaggcaaaatgtctactac

SEQ ID NO: 59966 - DNA, 50 bp, synthetic construct
  source 1..50: mol_type = other DNA
aatatgttttcttgtcatgggcaagtcaaaaatacccatgagaaaaagat

SEQ ID NO: 59967 - DNA, 50 bp, synthetic construct
  source 1..50: mol_type = other DNA
cctccttgaataaaaattaatacatatagattaaaattatgataacaatt

SEQ ID NO: 59968 - DNA, 50 bp, synthetic construct
  source 1..50: mol_type = other DNA
gcgcgcggcggcccgtggagggcggacgccctgatgcccccgcgcccctc

SEQ ID NO: 59969 - DNA, 50 bp, synthetic construct
  source 1..50: mol_type = other DNA
tctacagataaaagattaaacaaaaatggagatacccttatgattgtaga

SEQ ID NO: 59970 - DNA, 50 bp, synthetic construct
  source 1..50: mol_type = other DNA
attaaaatttagtatttctctctttttcatctgatccagttcgtttactg

SEQ ID NO: 59971 - DNA, 50 bp, synthetic construct
  source 1..50: mol_type = other DNA
ggccccttttggggcttttgttgtttctgggaaaaccccagcctttacgc

SEQ ID NO: 59972 - DNA, 50 bp, synthetic construct
  source 1..50: mol_type = other DNA
agcggtgaagcatacaaaaatataataaaatttttatatcgcaaatcgca

SEQ ID NO: 59973 - DNA, 50 bp, synthetic construct
  source 1..50: mol_type = other DNA
tacattgaaggtaaaatgctaaataaagatttcatacaacggattcccga

SEQ ID NO: 59974 - DNA, 50 bp, synthetic construct
  source 1..50: mol_type = other DNA
gcaaaacactcgttaaaccttttgtataaactgagcagcttgtgctatta

SEQ ID NO: 59975 - DNA, 50 bp, synthetic construct
  source 1..50: mol_type = other DNA
gaatgttgatacaaatcaagttattacgattattatgcatatcaacaatc

SEQ ID NO: 59976 - DNA, 50 bp, synthetic construct
  source 1..50: mol_type = other DNA
ttaaaaagacaattaaggtcacattaatgtgatgctgtaggtattcacgc

SEQ ID NO: 59977 - DNA, 50 bp, synthetic construct
  source 1..50: mol_type = other DNA
atgtatggcactagcagcttcatatctttgaaaatgctagtattgtatat

SEQ ID NO: 59978 - DNA, 50 bp, synthetic construct
  source 1..50: mol_type = other DNA
caatggctcgtttcatagtatttcctgaaatgatttgaaaaatttttgaa

SEQ ID NO: 59979 - DNA, 50 bp, synthetic construct
  source 1..50: mol_type = other DNA
gctttgtgatatagccttcacggtatatcatgaatgcgatttctaaatgt

SEQ ID NO: 59980 - DNA, 50 bp, synthetic construct
  source 1..50: mol_type = other DNA
atatcaagtaatcagccaagtaattttgtaataaggcatcccctttgtat

SEQ ID NO: 59981 - DNA, 50 bp, synthetic construct
  source 1..50: mol_type = other DNA
aataaaacttagaaattaatgcttagtagttgaaagatgcaaccagtaga

SEQ ID NO: 59982 - DNA, 50 bp, synthetic construct
  source 1..50: mol_type = other DNA
tcgtcataaggtcagtttaacgaaaagtcataaacatgaccttttggtca

SEQ ID NO: 59983 - DNA, 50 bp, synthetic construct
  source 1..50: mol_type = other DNA
gcgaaacctgaactactacttgaaagggcaccaaagtagtcagtttcaaa

SEQ ID NO: 59984 - DNA, 50 bp, synthetic construct
  source 1..50: mol_type = other DNA
tgttgtatcgattttttttgctaaattaaacataagacgccgatacatta

SEQ ID NO: 59985 - DNA, 50 bp, synthetic construct
  source 1..50: mol_type = other DNA
atttacgacattcggatttgcaggaatagggtgtattttataccttaaat

SEQ ID NO: 59986 - DNA, 50 bp, synthetic construct
  source 1..50: mol_type = other DNA
cacacgccatttggatatataatcgtgttttcatcagcaaggcgggcaat

SEQ ID NO: 59987 - DNA, 50 bp, synthetic construct
  source 1..50: mol_type = other DNA
gaatctgacaggttcggtgcggacatttctttaagttatttttcagattt

SEQ ID NO: 59988 - DNA, 50 bp, synthetic construct
  source 1..50: mol_type = other DNA
aacaatatggcatattgcctcacctcgcagagcgtctataatcctttttt

SEQ ID NO: 59989 - DNA, 50 bp, synthetic construct
  source 1..50: mol_type = other DNA
tgacttctaaatccccggtacgaagcttcgcctttttttcttttgagatc

SEQ ID NO: 59990 - DNA, 50 bp, synthetic construct
  source 1..50: mol_type = other DNA
aactgcagcatctttttcaagcgtatttctttgaactgcctaatcatatc

SEQ ID NO: 59991 - DNA, 50 bp, synthetic construct
  source 1..50: mol_type = other DNA
tcggaggtaacttttcatcggcttttgcgccaatgctttgtgcagtttcg

SEQ ID NO: 59992 - DNA, 50 bp, synthetic construct
  source 1..50: mol_type = other DNA
tagtgttcttaacttcttcaatgcctgctatcgtagagttatctacacta

SEQ ID NO: 59993 - DNA, 50 bp, synthetic construct
  source 1..50: mol_type = other DNA
taatatccttttgtttgggaaacttccgtctcccttagttaaagatatga

SEQ ID NO: 59994 - DNA, 50 bp, synthetic construct
  source 1..50: mol_type = other DNA
aattgtgcaaaataagtagtgtgtttgcaagttgcttattttgcacacgt

SEQ ID NO: 59995 - DNA, 50 bp, synthetic construct
  source 1..50: mol_type = other DNA
gcccggccggatcttggcggatagacctcgtcgcggtgggcgaacccggc

SEQ ID NO: 59996 - DNA, 50 bp, synthetic construct
  source 1..50: mol_type = other DNA
cagtttgataatatttagaggttcaaaaacctctagatattatagaaaga

SEQ ID NO: 59997 - DNA, 50 bp, synthetic construct
  source 1..50: mol_type = other DNA
attgtattttttctttgtgctaaaattgttattaaacgaaaaaacattaa

SEQ ID NO: 59998 - DNA, 50 bp, synthetic construct
  source 1..50: mol_type = other DNA
tatttgcaaacgctatgcatctcaaatgtgatgtgtagggattgcaaatg

SEQ ID NO: 59999 - DNA, 50 bp, synthetic construct
  source 1..50: mol_type = other DNA
tgtcgtcaccttgttggtgtaattagattgacgccaacatggtagcgaca

SEQ ID NO: 60000 - DNA, 50 bp, synthetic construct
  source 1..50: mol_type = other DNA
ggagtttgtcacagactttaaagttccataagagacctgtgatatcctct

SEQ ID NO: 60001 - DNA, 50 bp, synthetic construct
  source 1..50: mol_type = other DNA
catgaatcgtatagtcggtatgttgaaatagtgcttctatattcatcatt

SEQ ID NO: 60002 - DNA, 50 bp, synthetic construct
  source 1..50: mol_type = other DNA
ccatccatttttacgagctttaataatataaattaataaagaagggagtt

SEQ ID NO: 60003 - DNA, 50 bp, synthetic construct
  source 1..50: mol_type = other DNA
aaccacgaatccatgatgaaagcaatgtccgtcaatcaggaaattctgtc

SEQ ID NO: 60004 - DNA, 50 bp, synthetic construct
  source 1..50: mol_type = other DNA
gcccctgatcgggctaccggcggcaagccgagggaggttcggatgcttga

SEQ ID NO: 60005 - DNA, 50 bp, synthetic construct
  source 1..50: mol_type = other DNA
gacagcggaaacctgcacatccatatctggtcgtgcagcgcagcgcggat

SEQ ID NO: 60006 - DNA, 50 bp, synthetic construct
  source 1..50: mol_type = other DNA
tggtgcaattatagctccacgatggacatcgtcaagaagtatatgctccg

SEQ ID NO: 60007 - DNA, 50 bp, synthetic construct
  source 1..50: mol_type = other DNA
tctacgccgttaagcatggtttgtatacatgttatcagagcttcccgatc

SEQ ID NO: 60008 - DNA, 50 bp, synthetic construct
  source 1..50: mol_type = other DNA
agggtcatacccgccaccgcccctattgtggcgctggaaactatgataga

SEQ ID NO: 60009 - DNA, 50 bp, synthetic construct
  source 1..50: mol_type = other DNA
gcagggttccgtcaagctggaagccggacactaacttgggagaacccctc

SEQ ID NO: 60010 - DNA, 50 bp, synthetic construct
  source 1..50: mol_type = other DNA
gtctggctaaaaatgaagaggcagtgattttaaccaattttctgccaggg

SEQ ID NO: 60011 - DNA, 50 bp, synthetic construct
  source 1..50: mol_type = other DNA
cttggtcttattataacacggtcacctgcctgtgtcaagtaagaaccaaa

SEQ ID NO: 60012 - DNA, 50 bp, synthetic construct
  source 1..50: mol_type = other DNA
ggcgtgtttgctggcgtccctggcggagatggacccagtgcatatattcc

SEQ ID NO: 60013 - DNA, 50 bp, synthetic construct
  source 1..50: mol_type = other DNA
ccccgattggaaccgggttcggattaaatccgaaccctcaacctcagcca

SEQ ID NO: 60014 - DNA, 50 bp, synthetic construct
  source 1..50: mol_type = other DNA
ataacgataggggcattggttagtaagaaaaccaaattctataacgttaa

SEQ ID NO: 60015 - DNA, 50 bp, synthetic construct
  source 1..50: mol_type = other DNA
atattctttcttgaatgtcttagatgccaatgcaaggcaagaagtcatag

SEQ ID NO: 60016 - DNA, 50 bp, synthetic construct
  source 1..50: mol_type = other DNA
ttgctgggtttctgttttaacaacattaaacaaaaattatatcccaccac

SEQ ID NO: 60017 - DNA, 50 bp, synthetic construct
  source 1..50: mol_type = other DNA
atgtatgttactagcagcttcatatctttgaaaatgctagtattgtatat

SEQ ID NO: 60018 - DNA, 50 bp, synthetic construct
  source 1..50: mol_type = other DNA
gcggcatgatccgcccgggctgcctgtcggaaccgggcgacggcctgagg

SEQ ID NO: 60019 - DNA, 50 bp, synthetic construct
  source 1..50: mol_type = other DNA
aataattatataaatcacgctgcaaactgtcaattctgaatataatcagg

SEQ ID NO: 60020 - DNA, 50 bp, synthetic construct
  source 1..50: mol_type = other DNA
gatatctataagtttcataactatttatgaagctgattattatagaaaaa

SEQ ID NO: 60021 - DNA, 50 bp, synthetic construct
  source 1..50: mol_type = other DNA
cctatggttataatttttatttcgtcatctccaccaatcttaaccatatc

SEQ ID NO: 60022 - DNA, 50 bp, synthetic construct
  source 1..50: mol_type = other DNA
ctgtaccttacagatactcaaaatatatattatcactgtgaaaggaggag

SEQ ID NO: 60023 - DNA, 50 bp, synthetic construct
  source 1..50: mol_type = other DNA
acaaagttacaaaattaatgttaataactactctaattatgtaagtttat

SEQ ID NO: 60024 - DNA, 50 bp, synthetic construct
  source 1..50: mol_type = other DNA
tagttaaggatgtgtttaaatcataggtgcgattgacacatcctgaaact

SEQ ID NO: 60025 - DNA, 50 bp, synthetic construct
  source 1..50: mol_type = other DNA
aaagtgtacaaataaagaaaacaacgcatcacgtggagtgtgtagtgttg

SEQ ID NO: 60026 - DNA, 50 bp, synthetic construct
  source 1..50: mol_type = other DNA
atactatagtattccgaattctaattgcaaatcctattttctcccagtat

SEQ ID NO: 60027 - DNA, 50 bp, synthetic construct
  source 1..50: mol_type = other DNA
agcttgtttatttagattgtttagttgcgaaagatataaatacaaaaatt

SEQ ID NO: 60028 - DNA, 50 bp, synthetic construct
  source 1..50: mol_type = other DNA
gcaatttttcggaaataattcgagaaaagaacgtatgtgcgaaaggagaa

SEQ ID NO: 60029 - DNA, 50 bp, synthetic construct
  source 1..50: mol_type = other DNA
tggcttactttctcgacaattgaggtctcggtggtgcacgattgcagcca

SEQ ID NO: 60030 - DNA, 50 bp, synthetic construct
  source 1..50: mol_type = other DNA
agtcaacattccctaattcaccttctaaggaggtctaaccatgaaaactg

SEQ ID NO: 60031 - DNA, 50 bp, synthetic construct
  source 1..50: mol_type = other DNA
ttcatccgacaaggggcgccaaaactgcagggcgcgccaccctggtgcaa

SEQ ID NO: 60032 - DNA, 50 bp, synthetic construct
  source 1..50: mol_type = other DNA
gggattcgtcctttttttgtgtttataaaccgcataacaaaagggttccc

SEQ ID NO: 60033 - DNA, 50 bp, synthetic construct
  source 1..50: mol_type = other DNA
acggtggccgagttgctcgaaacacctttcgtccttgacgatgccgtcca

SEQ ID NO: 60034 - DNA, 50 bp, synthetic construct
  source 1..50: mol_type = other DNA
cgagtggggtttaaattccataccgtaaatggtaactttaaccccacttc

SEQ ID NO: 60035 - DNA, 50 bp, synthetic construct
  source 1..50: mol_type = other DNA
gtcaaatattgcgatatcaaattatacgaactgatatcgtaatactcatt

SEQ ID NO: 60036 - DNA, 50 bp, synthetic construct
  source 1..50: mol_type = other DNA
tcgccgcgcccgcgtcggccatcaggtgaaggcccttgcgcgcgcggccg

SEQ ID NO: 60037 - DNA, 50 bp, synthetic construct
  source 1..50: mol_type = other DNA
ctggcctccttcgccgcgacgccggcattcctctacgccgccgctgccat

SEQ ID NO: 60038 - DNA, 50 bp, synthetic construct
  source 1..50: mol_type = other DNA
tagcagcaattactcccgcaggagcattattatccccgtaacgcttgcta

SEQ ID NO: 60039 - DNA, 50 bp, synthetic construct
  source 1..50: mol_type = other DNA
acagggccttgtccctgaaagcgaaaacatgaagagaataaggagtgaga

SEQ ID NO: 60040 - DNA, 50 bp, synthetic construct
  source 1..50: mol_type = other DNA
tctttcaaactcagcacataattggccaacagtgtgcaatgtacaacaat

SEQ ID NO: 60041 - DNA, 50 bp, synthetic construct
  source 1..50: mol_type = other DNA
tccgcccctgcttcaccgcccagtgagctacgcggccaccagttcgcgga

SEQ ID NO: 60042 - DNA, 50 bp, synthetic construct
  source 1..50: mol_type = other DNA
acaattcgacaaaataaacgaaattaaagaattatatttttaattctggt

SEQ ID NO: 60043 - DNA, 50 bp, synthetic construct
  source 1..50: mol_type = other DNA
atggaaccttttgcagagcatatccagacgtgctatgttattggttccac

SEQ ID NO: 60044 - DNA, 50 bp, synthetic construct
  source 1..50: mol_type = other DNA
ttgcgaataatgggtccaatgctagctagcattggacctacacgaatttc

SEQ ID NO: 60045 - DNA, 50 bp, synthetic construct
  source 1..50: mol_type = other DNA
taagaaagctctcatggttccctcgataactatccgaaagacaagtacga

SEQ ID NO: 60046 - DNA, 50 bp, synthetic construct
  source 1..50: mol_type = other DNA
tttttttatcttagtgttccaatgtacgttttaacactaaaataaaaaag

SEQ ID NO: 60047 - DNA, 50 bp, synthetic construct
  source 1..50: mol_type = other DNA
taagtcattaatatttctttccagttcgaaaaaatttcaaaaaagacttg

SEQ ID NO: 60048 - DNA, 50 bp, synthetic construct
  source 1..50: mol_type = other DNA
aagatgaacttataaacgttatggcttcatataattaccaagaacgcggc

SEQ ID NO: 60049 - DNA, 50 bp, synthetic construct
  source 1..50: mol_type = other DNA
aagggaaggttgtctctgatccattaatggagcaaggtgatgctcaagcg

SEQ ID NO: 60050 - DNA, 50 bp, synthetic construct
  source 1..50: mol_type = other DNA
ttattatatctagcagtaattttttaaagaaagggggatatagtggatag

SEQ ID NO: 60051 - DNA, 50 bp, synthetic construct
  source 1..50: mol_type = other DNA
tttttatgattatttatataagctaccttttaagttaataaatataaaat

SEQ ID NO: 60052 - DNA, 50 bp, synthetic construct
  source 1..50: mol_type = other DNA
ttttcaaaatagtaacagtattaaaaagcctaatggattaattttgatta

SEQ ID NO: 60053 - DNA, 50 bp, synthetic construct
  source 1..50: mol_type = other DNA
ttactttctggaattataaaatgtgcatatttaccttttaagttaataaa

SEQ ID NO: 60054 - DNA, 50 bp, synthetic construct
  source 1..50: mol_type = other DNA
ataataatataaaatacggtatttataaataccgtactaaatgaacagag

SEQ ID NO: 60055 - DNA, 50 bp, synthetic construct
  source 1..50: mol_type = other DNA
ttttaccatctaataaggtgcgcagaaccgtatcacaagtgatggtaaac

SEQ ID NO: 60056 - DNA, 50 bp, synthetic construct
  source 1..50: mol_type = other DNA
tgaatattttgtttttatgtttttataaaaaataaaaaacaaacaattca

SEQ ID NO: 60057 - DNA, 50 bp, synthetic construct
  source 1..50: mol_type = other DNA
gaaaaactttgctttatcttgtgaaatttattaataactttaaattttta

SEQ ID NO: 60058 - DNA, 50 bp, synthetic construct
  source 1..50: mol_type = other DNA
tttttgcaattactacacatcacatttgatatgtgtagtgtttgcaaaaa

SEQ ID NO: 60059 - DNA, 50 bp, synthetic construct
  source 1..50: mol_type = other DNA
tggttacatccctgctaattaaaccagtataatcgctcatcatctaccct

SEQ ID NO: 60060 - DNA, 50 bp, synthetic construct
  source 1..50: mol_type = other DNA
aatttttaacagttaagcaccttagctaaggtgcttttaatataaatttg

SEQ ID NO: 60061 - DNA, 50 bp, synthetic construct
  source 1..50: mol_type = other DNA
tttttgcaaacactacacatctcaaatgtgatgtgtagtttttgcaaaaa

SEQ ID NO: 60062 - DNA, 50 bp, synthetic construct
  source 1..50: mol_type = other DNA
tatcaatcatgttctttaaataaatcttaattcaaagtatctttttgaac

SEQ ID NO: 60063 - DNA, 50 bp, synthetic construct
  source 1..50: mol_type = other DNA
ttttgtatctcgtttcttctccgtccaacgagagaaaacgaggaactaaa

SEQ ID NO: 60064 - DNA, 50 bp, synthetic construct
  source 1..50: mol_type = other DNA
tctttttttcggtaaaaaaagaagtaatgcttttttcttcctcgaaaata

SEQ ID NO: 60065 - DNA, 50 bp, synthetic construct
  source 1..50: mol_type = other DNA
atataagtattctactagatatattatgttatcattcctaatacatatat

SEQ ID NO: 60066 - DNA, 50 bp, synthetic construct
  source 1..50: mol_type = other DNA
aataaattgaagaaccgcacttaaaagtaagtgcgatttttacaaattga

SEQ ID NO: 60067 - DNA, 50 bp, synthetic construct
  source 1..50: mol_type = other DNA
tttcgcacatacgttcttttttgggtaatttctcgaattctttccgaaaa

SEQ ID NO: 60068 - DNA, 50 bp, synthetic construct
  source 1..50: mol_type = other DNA
cggtcagtccttaacccttgacatcatggcttgaaacaaacacctgaatg

SEQ ID NO: 60069 - DNA, 50 bp, synthetic construct
  source 1..50: mol_type = other DNA
atcactataattgacaaaccaaaagacctaaattctccaatttatatcaa

SEQ ID NO: 60070 - DNA, 50 bp, synthetic construct
  source 1..50: mol_type = other DNA
accaattagtaagtgcccttcttattccagaaggttccttgattgttgta

SEQ ID NO: 60071 - DNA, 50 bp, synthetic construct
  source 1..50: mol_type = other DNA
ttgctgcttgaaagatactgctggtggtacgtactctcttcatgcagtat

SEQ ID NO: 60072 - DNA, 50 bp, synthetic construct
  source 1..50: mol_type = other DNA
tgcggattgtaacataactagttgttactgtagttatgtcattaacccaa

SEQ ID NO: 60073 - DNA, 50 bp, synthetic construct
  source 1..50: mol_type = other DNA
cgggtgtaatcgacaactaccgactacgcgatcgttcggttttacacccg

SEQ ID NO: 60074 - DNA, 50 bp, synthetic construct
  source 1..50: mol_type = other DNA
agttgaaatatgacttcatcgtcggacgagaatggggtatgtccccgcat

SEQ ID NO: 60075 - DNA, 50 bp, synthetic construct
  source 1..50: mol_type = other DNA
tcaaatcaggcgattcgtgcagcatatcctgccgttctgcgccgccttgg

SEQ ID NO: 60076 - DNA, 50 bp, synthetic construct
  source 1..50: mol_type = other DNA
attgtaatctattttacaccagtgaacactaatgatttttagataactta

SEQ ID NO: 60077 - DNA, 50 bp, synthetic construct
  source 1..50: mol_type = other DNA
aaatcacccaactctcctgagggaaaactcttcaatccgagtcgcaattt

SEQ ID NO: 60078 - DNA, 50 bp, synthetic construct
  source 1..50: mol_type = other DNA
caacattattttttttcatactgaatattttatgaaagataatataacac

SEQ ID NO: 60079 - DNA, 50 bp, synthetic construct
  source 1..50: mol_type = other DNA
ataaacagagtcggtgctggtgcagctgattctatgcggactatccgtaa

SEQ ID NO: 60080 - DNA, 50 bp, synthetic construct
  source 1..50: mol_type = other DNA
gatggtgagtttaaaggcgatcgagctgtttcaatttaacgatggtcata

SEQ ID NO: 60081 - DNA, 50 bp, synthetic construct
  source 1..50: mol_type = other DNA
tatttttttgtaaatagagagttttaaaattctttattttagttactttc

SEQ ID NO: 60082 - DNA, 50 bp, synthetic construct
  source 1..50: mol_type = other DNA
aagaccgagacgatcgtgcacaaccggttgtcgacgacgtctacaccttt

SEQ ID NO: 60083 - DNA, 50 bp, synthetic construct
  source 1..50: mol_type = other DNA
atgataatttgaaggaattagcagatcgacaaattatttcaaaatcaaca

SEQ ID NO: 60084 - DNA, 50 bp, synthetic construct
  source 1..50: mol_type = other DNA
cacaaatggttgctgaattgcccgtacgttagcggtatgactgataacta

SEQ ID NO: 60085 - DNA, 50 bp, synthetic construct
  source 1..50: mol_type = other DNA
attaactccttggtagtagcgaggaccaaatatactatcaattaaaggaa

SEQ ID NO: 60086 - DNA, 50 bp, synthetic construct
  source 1..50: mol_type = other DNA
gtggcgtcattgtgaggttccctccgccggggagctcaccatgtcgctgc

SEQ ID NO: 60087 - DNA, 50 bp, synthetic construct
  source 1..50: mol_type = other DNA
agttccaccagttgcacgaactcgccgctgttcgtgcgcctactggatga

SEQ ID NO: 60088 - DNA, 50 bp, synthetic construct
  source 1..50: mol_type = other DNA
agcatcaattttagatgtaccgcatgtgcaatacatctgaaattactgca

SEQ ID NO: 60089 - DNA, 50 bp, synthetic construct
  source 1..50: mol_type = other DNA
tgttacttcttatgttcatcaaatgctatgtatcaacattagagttaaca

SEQ ID NO: 60090 - DNA, 50 bp, synthetic construct
  source 1..50: mol_type = other DNA
gactttattctttactattttataaaaatatagaggggaggagttaactt

SEQ ID NO: 60091 - DNA, 50 bp, synthetic construct
  source 1..50: mol_type = other DNA
taatatatgttacttcttatgttcatcaacattagagttaacattggtag

SEQ ID NO: 60092 - DNA, 50 bp, synthetic construct
  source 1..50: mol_type = other DNA
ttgttttggaattgagggtcatataaggttgcgctacagttccacttgaa

SEQ ID NO: 60093 - DNA, 50 bp, synthetic construct
  source 1..50: mol_type = other DNA
cgcaccggctgattacccgtggggcacaccacctttacaccgccggggcg

SEQ ID NO: 60094 - DNA, 50 bp, synthetic construct
  source 1..50: mol_type = other DNA
acatagcattaacctcaatatccttaaagtttttgatatttagcacatgg

SEQ ID NO: 60095 - DNA, 50 bp, synthetic construct
  source 1..50: mol_type = other DNA
ttcatattgttattgtactactttaaagtgtagttccaaaactatccaaa

SEQ ID NO: 60096 - DNA, 50 bp, synthetic construct
  source 1..50: mol_type = other DNA
tgtcgcacttttatacatagagcatctactataactaaaaaagtgcaact

SEQ ID NO: 60097 - DNA, 50 bp, synthetic construct
  source 1..50: mol_type = other DNA
aacttgtaattccattcgaattacctcctttatcagtggaatcacgggtt

SEQ ID NO: 60098 - DNA, 50 bp, synthetic construct
  source 1..50: mol_type = other DNA
acatacatcactctaaaagctattaaataaacgagtagcatattgattat

SEQ ID NO: 60099 - DNA, 50 bp, synthetic construct
  source 1..50: mol_type = other DNA
gtagaacatttgaagaaaaaaaggctccttttttttaccaaaaaaagaac

SEQ ID NO: 60100 - DNA, 50 bp, synthetic construct
  source 1..50: mol_type = other DNA
agctgtctggagctttgtgggtcttttgtcccacaaaaattcgtaaacat

SEQ ID NO: 60101 - DNA, 50 bp, synthetic construct
  source 1..50: mol_type = other DNA
acacctaacctgtgctaattgacatatttcatttagcttattaaaattac

SEQ ID NO: 60102 - DNA, 50 bp, synthetic construct
  source 1..50: mol_type = other DNA
cctgctcgcgttgaagcttgctgaatacagctatactcagtgattagtac

SEQ ID NO: 60103 - DNA, 50 bp, synthetic construct
  source 1..50: mol_type = other DNA
tggtatctttaactttgggaaactcccgtttcccttagttaaagatattg

SEQ ID NO: 60104 - DNA, 50 bp, synthetic construct
  source 1..50: mol_type = other DNA
aagatgaacttataaacgttatggcttgtcaaatcttcgtagttcctctt

SEQ ID NO: 60105 - DNA, 50 bp, synthetic construct
  source 1..50: mol_type = other DNA
gtggaaaatataaataattttagtaacaaaatctattttatatttcagta

SEQ ID NO: 60106 - DNA, 50 bp, synthetic construct
  source 1..50: mol_type = other DNA
tcataggagattaatagatcattgtttgatgatcgtgagatggccaaaga

SEQ ID NO: 60107 - DNA, 50 bp, synthetic construct
  source 1..50: mol_type = other DNA
catgtcaacgacgtatagtataggtaaataaaccgattgtttcgtaaatt

SEQ ID NO: 60108 - DNA, 50 bp, synthetic construct
  source 1..50: mol_type = other DNA
gagcaaaccaactttgagatctccgcggcatgctgctggataattcgctc

SEQ ID NO: 60109 - DNA, 50 bp, synthetic construct
  source 1..50: mol_type = other DNA
aagaggtcttgtgaagacaacatgagcatggtattttcaaaagacccatc

SEQ ID NO: 60110 - DNA, 50 bp, synthetic construct
  source 1..50: mol_type = other DNA
aatatatattaaccacccttagggttgcctaacgacgcagaatatatact

SEQ ID NO: 60111 - DNA, 50 bp, synthetic construct
  source 1..50: mol_type = other DNA
gcctgcctgacttcatgcattgatagagtttgtcatgactacacgccgcc

SEQ ID NO: 60112 - DNA, 50 bp, synthetic construct
  source 1..50: mol_type = other DNA
aaatgtgtaatagaaattaaaatgaaaactataaagtctatcgtacaact

SEQ ID NO: 60113 - DNA, 50 bp, synthetic construct
  source 1..50: mol_type = other DNA
gccgagcgaggcgaacgctaaatggccagttcaatatcgaccccaagggc

SEQ ID NO: 60114 - DNA, 50 bp, synthetic construct
  source 1..50: mol_type = other DNA
ggtggatcgcttacaactgaaaattcagctcgacgcgatcgcgaaaaacc

SEQ ID NO: 60115 - DNA, 50 bp, synthetic construct
  source 1..50: mol_type = other DNA
tcgtcaatgcgtgggaactcattttgtgacgggttttgtcgctgggatct

SEQ ID NO: 60116 - DNA, 50 bp, synthetic construct
  source 1..50: mol_type = other DNA
gagttcgacgcttcctcttttggtggagccgagggggaagcagtcgaact

SEQ ID NO: 60117 - DNA, 50 bp, synthetic construct
  source 1..50: mol_type = other DNA
cgagatgacgagacacacgtcgagacatcgagacggttgcggttctatct

SEQ ID NO: 60118 - DNA, 50 bp, synthetic construct
  source 1..50: mol_type = other DNA
agtaaatggaaaagcggtggtcgatgctcattctctcttttatatttaaa

SEQ ID NO: 60119 - DNA, 50 bp, synthetic construct
  source 1..50: mol_type = other DNA
tccggaatatgctacactcgtaccggtatcttcgtgtagtatattccgct

SEQ ID NO: 60120 - DNA, 50 bp, synthetic construct
  source 1..50: mol_type = other DNA
cggattcaagctcctgaagcttgtcatccagagccaagagctggacgccg

SEQ ID NO: 60121 - DNA, 50 bp, synthetic construct
  source 1..50: mol_type = other DNA
tcacctttttggtatgtttttctagttacaaaacggtacgaaaaaagccg

SEQ ID NO: 60122 - DNA, 50 bp, synthetic construct
  source 1..50: mol_type = other DNA
tacacgaagatattccaaattcctcgaagcgggtgtccagtttctttttg

SEQ ID NO: 60123 - DNA, 50 bp, synthetic construct
  source 1..50: mol_type = other DNA
ccaacgttgagcctcgggtgcctgcacagacacccaaggatcacgcctta

SEQ ID NO: 60124 - DNA, 50 bp, synthetic construct
  source 1..50: mol_type = other DNA
aggtcgatttcgtcgtaacccgtgatcgccgccagcggcgaattctgccc

SEQ ID NO: 60125 - DNA, 50 bp, synthetic construct
  source 1..50: mol_type = other DNA
agcaacgctttttaaactgcagccattgctgcaattaaattctgtttata

SEQ ID NO: 60126 - DNA, 50 bp, synthetic construct
  source 1..50: mol_type = other DNA
accacgggtaccacgccgtgcggtgctacgcggtcggtggtatacccggc

SEQ ID NO: 60127 - DNA, 50 bp, synthetic construct
  source 1..50: mol_type = other DNA
gccgcccccgcgcccaccgacatggccgccccctgctgctggagggcggg

SEQ ID NO: 60128 - DNA, 50 bp, synthetic construct
  source 1..50: mol_type = other DNA
atatttacatcttttgtatcaacgctgcgggagtcaaaaggtccagtgga

SEQ ID NO: 60129 - DNA, 50 bp, synthetic construct
  source 1..50: mol_type = other DNA
ttcttgtctgtataagcaaaattacattagattagttagatagtaaaaaa

SEQ ID NO: 60130 - DNA, 50 bp, synthetic construct
  source 1..50: mol_type = other DNA
tcacgaacaagtatggcatatcactcactctttgccacaatgtcaagtga

SEQ ID NO: 60131 - DNA, 50 bp, synthetic construct
  source 1..50: mol_type = other DNA
tgtcattaccctgttggtgtcaacctaattacaccaacaaggtgacgaca

SEQ ID NO: 60132 - DNA, 50 bp, synthetic construct
  source 1..50: mol_type = other DNA
caaatataaatgaaaccgttgattaataagtgaggtttttttaagaaaaa

SEQ ID NO: 60133 - DNA, 50 bp, synthetic construct
  source 1..50: mol_type = other DNA
tttcatattttttattaagggtacatctacccttttttctgtttataaaa

SEQ ID NO: 60134 - DNA, 50 bp, synthetic construct
  source 1..50: mol_type = other DNA
tttattaagggtacatccctgctaaccgttcatcatctacccttttttct

SEQ ID NO: 60135 - DNA, 50 bp, synthetic construct
  source 1..50: mol_type = other DNA
caatctatgtattcatagcccagttattgtgtctatgaatacataagttg

SEQ ID NO: 60136 - DNA, 50 bp, synthetic construct
  source 1..50: mol_type = other DNA
ctattcttgttaacaaactacaagatgttcatgtttattaaacaaaataa

SEQ ID NO: 60137 - DNA, 50 bp, synthetic construct
  source 1..50: mol_type = other DNA
cgccatctcgtactcctttccagctcagggaccaggtaggaggacagatc

SEQ ID NO: 60138 - DNA, 50 bp, synthetic construct
  source 1..50: mol_type = other DNA
tggtccgcctccttctgcatccgcatgcgttcacccgtgatggcaaagcc

SEQ ID NO: 60139 - DNA, 50 bp, synthetic construct
  source 1..50: mol_type = other DNA
agtactatcagcatgcatttttgaaaattcacattcctgctgttagcatc

SEQ ID NO: 60140 - DNA, 50 bp, synthetic construct
  source 1..50: mol_type = other DNA
ttgtttgtataagcataacacacttgagtgtgtgatgcttattacaacat

SEQ ID NO: 60141 - DNA, 50 bp, synthetic construct
  source 1..50: mol_type = other DNA
gcttttataaaccttagtggtgggatattttatcccaagtttgaaaatct

SEQ ID NO: 60142 - DNA, 50 bp, synthetic construct
  source 1..50: mol_type = other DNA
tttatcaggttttactgtttcgctaacactaaacggggaaaccttgtaaa

SEQ ID NO: 60143 - DNA, 50 bp, synthetic construct
  source 1..50: mol_type = other DNA
aaactgttttttattggcgaaccacaactttcttcgggaaagatcacaaa

SEQ ID NO: 60144 - DNA, 50 bp, synthetic construct
  source 1..50: mol_type = other DNA
ataaggtaaatattgccaacaatagtaatagtcggtagcatttacctttc

SEQ ID NO: 60145 - DNA, 50 bp, synthetic construct
  source 1..50: mol_type = other DNA
catttattaaaagggttaatattgtgtaatatttaccttttaaaggtaga

SEQ ID NO: 60146 - DNA, 50 bp, synthetic construct
  source 1..50: mol_type = other DNA
tacatatcagctcccagttcccataagcgggaaccgagaaatcggttccc

SEQ ID NO: 60147 - DNA, 50 bp, synthetic construct
  source 1..50: mol_type = other DNA
aaccatactttggcaaattatttcatatagtggtttgcttaagtatggtt

SEQ ID NO: 60148 - DNA, 50 bp, synthetic construct
  source 1..50: mol_type = other DNA
ataggtcttttaggttccaaaagtaggaatcttagatataatagacctac

SEQ ID NO: 60149 - DNA, 50 bp, synthetic construct
  source 1..50: mol_type = other DNA
gttgccagccgtagatgcaggcgatatcgccgccgatgtgataaggcaag

SEQ ID NO: 60150 - DNA, 50 bp, synthetic construct
  source 1..50: mol_type = other DNA
gttttcattgaatttgtaccccttttttctcgtccaactttttccgagtg

SEQ ID NO: 60151 - DNA, 50 bp, synthetic construct
  source 1..50: mol_type = other DNA
gactctacgataaacaaagaagaagtaatggcacagcttatcagaaagta

SEQ ID NO: 60152 - DNA, 50 bp, synthetic construct
  source 1..50: mol_type = other DNA
ggttaataatttgtgttcctatcctagcacttttgtccaaactcgatgtc

SEQ ID NO: 60153 - DNA, 50 bp, synthetic construct
  source 1..50: mol_type = other DNA
ttagcgtttttagtgtcttacattcaaatgcaagatactaaaattcttcc

SEQ ID NO: 60154 - DNA, 50 bp, synthetic construct
  source 1..50: mol_type = other DNA
tacttccttatgagcacctaccattttaggtagtaactcataaggaagta

SEQ ID NO: 60155 - DNA, 50 bp, synthetic construct
  source 1..50: mol_type = other DNA
caaataaagagtaaataagcaccttaaggtgcttaataattatcgtttta

SEQ ID NO: 60156 - DNA, 50 bp, synthetic construct
  source 1..50: mol_type = other DNA
ttttgcaagaacgatggacttcacattacaccaacaaggtgacgacaaag

SEQ ID NO: 60157 - DNA, 50 bp, synthetic construct
  source 1..50: mol_type = other DNA
tttagttcctcgtttcctctcgttggacggagaataaatgagatactaat

SEQ ID NO: 60158 - DNA, 50 bp, synthetic construct
  source 1..50: mol_type = other DNA
attatatgaattgtaatgattggaatgtttttcaaaatcagctttataat

SEQ ID NO: 60159 - DNA, 50 bp, synthetic construct
  source 1..50: mol_type = other DNA
acaaattgcctgggctttaataagtacttaaaaacgccaaataattttga

SEQ ID NO: 60160 - DNA, 50 bp, synthetic construct
  source 1..50: mol_type = other DNA
ttatttagattgtttagtacctcatttccgctactttcttttctaagtct

SEQ ID NO: 60161 - DNA, 50 bp, synthetic construct
  source 1..50: mol_type = other DNA
aaatctccatttctttgcaaatactagtgtttgcaaataaaggcttataa

SEQ ID NO: 60162 - DNA, 50 bp, synthetic construct
  source 1..50: mol_type = other DNA
gttttacaacattactctgagatttcaaatacagataaatgttgtaaaaa

SEQ ID NO: 60163 - DNA, 50 bp, synthetic construct
  source 1..50: mol_type = other DNA
ttttatgaattttatattgggtatatctacccttttctcggtttataaaa

SEQ ID NO: 60164 - DNA, 50 bp, synthetic construct
  source 1..50: mol_type = other DNA
tatttagattatttagtacctcgttaccgaagatgcaaataattctaaat

SEQ ID NO: 60165 - DNA, 50 bp, synthetic construct
  source 1..50: mol_type = other DNA
tcaatttgttctttcgttatagaaacttcttaaaaagaataacattatat

SEQ ID NO: 60166 - DNA, 50 bp, synthetic construct
  source 1..50: mol_type = other DNA
ttttcttgcctttttccatattcttaagttctctgacaccttcaataaaa

SEQ ID NO: 60167 - DNA, 50 bp, synthetic construct
  source 1..50: mol_type = other DNA
acagcagcgttcataataactccttaaatgatagttatgccgatagctgt

SEQ ID NO: 60168 - DNA, 50 bp, synthetic construct
  source 1..50: mol_type = other DNA
cgacgaggcgccggagttctccgccggcgggaccctcgtccgccgtccgc

SEQ ID NO: 60169 - DNA, 50 bp, synthetic construct
  source 1..50: mol_type = other DNA
gccgcgccgctgttcgagagaggtgccccgttcctgctcattcgcgcggc

SEQ ID NO: 60170 - DNA, 50 bp, synthetic construct
  source 1..50: mol_type = other DNA
ttgccataaggtcagtttaacgaaaagtcattaatgtcacctattcgagc

SEQ ID NO: 60171 - DNA, 50 bp, synthetic construct
  source 1..50: mol_type = other DNA
ttcaaatagcgatctacacatgaaatttcatgtattgaaaagccttctgc

SEQ ID NO: 60172 - DNA, 50 bp, synthetic construct
  source 1..50: mol_type = other DNA
tagttgtaaaaccgtgcaattgagtactcggttgtatagaattactaccc

SEQ ID NO: 60173 - DNA, 50 bp, synthetic construct
  source 1..50: mol_type = other DNA
cggattcatttgcagcagttcttccatagccgctgccccaaaagaaacgt

SEQ ID NO: 60174 - DNA, 50 bp, synthetic construct
  source 1..50: mol_type = other DNA
tgctgtatcaaattaaaacgggaaatttcccgattttagttccaagacac

SEQ ID NO: 60175 - DNA, 50 bp, synthetic construct
  source 1..50: mol_type = other DNA
cataatttcaaattcagccttgttttaataactcttaattaagaaatatt

SEQ ID NO: 60176 - DNA, 50 bp, synthetic construct
  source 1..50: mol_type = other DNA
aatgaaataacattaatagacttaattaaagcaattaatagctattgatt

SEQ ID NO: 60177 - DNA, 50 bp, synthetic construct
  source 1..50: mol_type = other DNA
ctatattcctcatcaaattcatcatttagcgatattggagaagattatat

SEQ ID NO: 60178 - DNA, 50 bp, synthetic construct
  source 1..50: mol_type = other DNA
gtaaaaaaagtcattctacataacaaaagaaatcaggtgattttatttat

SEQ ID NO: 60179 - DNA, 50 bp, synthetic construct
  source 1..50: mol_type = other DNA
ttactatatgaacataaaaggctcattatgctgttcctgctatgtattaa

SEQ ID NO: 60180 - DNA, 50 bp, synthetic construct
  source 1..50: mol_type = other DNA
gctctaataacatttgaaggtctcttgggttcatcaaattgtattttgcc

SEQ ID NO: 60181 - DNA, 50 bp, synthetic construct
  source 1..50: mol_type = other DNA
cccttcagatgatttaaaaaatgtaacagctttttaaaccgatcctgccg

SEQ ID NO: 60182 - DNA, 50 bp, synthetic construct
  source 1..50: mol_type = other DNA
tatatgaatccttcggaggaacaatatttttccttccaccagcttatagc

SEQ ID NO: 60183 - DNA, 50 bp, synthetic construct
  source 1..50: mol_type = other DNA
ttacactttttagccatagcaattaatattgctacaattataaaccaaaa

SEQ ID NO: 60184 - DNA, 50 bp, synthetic construct
  source 1..50: mol_type = other DNA
catctcacctcactttctgctattacaatagcatgacattgggtaagcgt

SEQ ID NO: 60185 - DNA, 50 bp, synthetic construct
  source 1..50: mol_type = other DNA
atttccttgccaagatttttctatgatattcaaatgatagcgaaaaaaat

SEQ ID NO: 60186 - DNA, 50 bp, synthetic construct
  source 1..50: mol_type = other DNA
agaaaacagtcattttcgacgcatttcgctatcgaacgagcgctctttcc

SEQ ID NO: 60187 - DNA, 50 bp, synthetic construct
  source 1..50: mol_type = other DNA
tatcagactgtacaagtattctgcttgcaaattatatgtacaatttgatt

SEQ ID NO: 60188 - DNA, 50 bp, synthetic construct
  source 1..50: mol_type = other DNA
tctattgcttctttatcacacacaaggacaccttcaaaagcagcaagggc

SEQ ID NO: 60189 - DNA, 50 bp, synthetic construct
  source 1..50: mol_type = other DNA
acagcatgaatatcacttacacacagttgtgattctgctacgcttgccag

SEQ ID NO: 60190 - DNA, 50 bp, synthetic construct
  source 1..50: mol_type = other DNA
aaagccagaacaatcaaaacttgccgaaatcatttgatttattgggcttt

SEQ ID NO: 60191 - DNA, 50 bp, synthetic construct
  source 1..50: mol_type = other DNA
cctcactgagcttattaagcatctgcagatgttatatccacatcatcaag

SEQ ID NO: 60192 - DNA, 50 bp, synthetic construct
  source 1..50: mol_type = other DNA
aaataaaaagtataacacttaatttaaaacaacactcatcatttacataa

SEQ ID NO: 60193 - DNA, 50 bp, synthetic construct
  source 1..50: mol_type = other DNA
cttttactttgagtgtacgcaatgattattgctttttcgaaaagaaaaac

SEQ ID NO: 60194 - DNA, 50 bp, synthetic construct
  source 1..50: mol_type = other DNA
ttacaccaggtagtagtgtaaatattgatgttatctactttgtacggtaa

SEQ ID NO: 60195 - DNA, 50 bp, synthetic construct
  source 1..50: mol_type = other DNA
aaattttgttaatttaaatattataaataatattgtactacacaaaaatt

SEQ ID NO: 60196 - DNA, 50 bp, synthetic construct
  source 1..50: mol_type = other DNA
aaatttaagctaatatagctatgaagctgggtctatttttttttccattt

SEQ ID NO: 60197 - DNA, 50 bp, synthetic construct
  source 1..50: mol_type = other DNA
tacaacattacggaacagaagaactagcaaccagtttgaataatccacct

SEQ ID NO: 60198 - DNA, 50 bp, synthetic construct
  source 1..50: mol_type = other DNA
tgtcgcatttttattcagtcagctccagctcactgaatgaaagtacgatt

SEQ ID NO: 60199 - DNA, 50 bp, synthetic construct
  source 1..50: mol_type = other DNA
gtggtgagatataatttttgtttaattaaacataaaattaaccatgatgt

SEQ ID NO: 60200 - DNA, 50 bp, synthetic construct
  source 1..50: mol_type = other DNA
tataaaccttagtggtgggatataatattacttgaccactacagtagcca

SEQ ID NO: 60201 - DNA, 50 bp, synthetic construct
  source 1..50: mol_type = other DNA
tcagcattttcgaacaagtcccctactaatgacttactaaccaatgcccc

SEQ ID NO: 60202 - DNA, 50 bp, synthetic construct
  source 1..50: mol_type = other DNA
tacctcactcttaatcgatacgctgagaagcatatcataaatgatgcggt

SEQ ID NO: 60203 - DNA, 50 bp, synthetic construct
  source 1..50: mol_type = other DNA
aaaggcttttgtgacaaggaaaataaacattccttttaaaaagtatgttt

SEQ ID NO: 60204 - DNA, 50 bp, synthetic construct
  source 1..50: mol_type = other DNA
gccataagctgtgcatacatcggcgagaagatgtattctgtaggtatttc

SEQ ID NO: 60205 - DNA, 50 bp, synthetic construct
  source 1..50: mol_type = other DNA
tgatgttaattattctggtcagtacctcctgaccggattaattaatatca

SEQ ID NO: 60206 - DNA, 50 bp, synthetic construct
  source 1..50: mol_type = other DNA
ataaaaattaagaatatagaataaatatcacaattattattgatttatat

SEQ ID NO: 60207 - DNA, 50 bp, synthetic construct
  source 1..50: mol_type = other DNA
ctattaaaatattcaatttcagttttaacctgtgcttcatagcttgataa

SEQ ID NO: 60208 - DNA, 50 bp, synthetic construct
  source 1..50: mol_type = other DNA
cctttctaaagtatttaatttattataataacataaatattaactaaata

SEQ ID NO: 60209 - DNA, 50 bp, synthetic construct
  source 1..50: mol_type = other DNA
ctttcttcttccccagagcaggattcctcccaggctggtaccaccggaaa

SEQ ID NO: 60210 - DNA, 50 bp, synthetic construct
  source 1..50: mol_type = other DNA
ttgctgcttgcacctgctgctagcctaaaggtgcccccgtcaataaacac

SEQ ID NO: 60211 - DNA, 50 bp, synthetic construct
  source 1..50: mol_type = other DNA
tattcattttaagtatattttattattgtaaacgatataagtaaaaaata

SEQ ID NO: 60212 - DNA, 50 bp, synthetic construct
  source 1..50: mol_type = other DNA
ggaaaagttataaagaaagaaaaagttttttaaatctttatattttttcg

SEQ ID NO: 60213 - DNA, 50 bp, synthetic construct
  source 1..50: mol_type = other DNA
ctaacctttatttatcatttgtaataactgaaatgctctgttcagcataa

SEQ ID NO: 60214 - DNA, 50 bp, synthetic construct
  source 1..50: mol_type = other DNA
cgcgagccgtagccgtcaccgcgccagcggcaggagccgcgcggcttact

SEQ ID NO: 60215 - DNA, 50 bp, synthetic construct
  source 1..50: mol_type = other DNA
taaccgttctatatacgtagaagccgacaggagggtatacagaatgaagg

SEQ ID NO: 60216 - DNA, 50 bp, synthetic construct
  source 1..50: mol_type = other DNA
gtaaggggtgtaatcctcaaccagcgaaagttgagctttacactcctgat

SEQ ID NO: 60217 - DNA, 50 bp, synthetic construct
  source 1..50: mol_type = other DNA
ttatagtgaatgcaacgatgtaacaggtactgaatctgacttcccttcat

SEQ ID NO: 60218 - DNA, 50 bp, synthetic construct
  source 1..50: mol_type = other DNA
cgttagttattggtatgaatctcacatgatatccatattaataactaacc

SEQ ID NO: 60219 - DNA, 50 bp, synthetic construct
  source 1..50: mol_type = other DNA
agaaaaaagggtagatgatgagcgattagcaaggatgtaaccaaatttaa

SEQ ID NO: 60220 - DNA, 50 bp, synthetic construct
  source 1..50: mol_type = other DNA
gtgtttatactgttgatatgtttttatctacctacttctcgtataataac

SEQ ID NO: 60221 - DNA, 50 bp, synthetic construct
  source 1..50: mol_type = other DNA
aagaagaagccgtcgtccacctacggccgggtggatcacggctctttccc

SEQ ID NO: 60222 - DNA, 50 bp, synthetic construct
  source 1..50: mol_type = other DNA
ttaacatagatatcttttataaacaagttcactaaagatactttaattgt

SEQ ID NO: 60223 - DNA, 50 bp, synthetic construct
  source 1..50: mol_type = other DNA
tggttgcggagtgtatagtagtggtcgtacttatatccactccgaagtgc

SEQ ID NO: 60224 - DNA, 50 bp, synthetic construct
  source 1..50: mol_type = other DNA
gccagctgggctaaacgcccggccaaacccgggtttagagcgtacatgga

SEQ ID NO: 60225 - DNA, 50 bp, synthetic construct
  source 1..50: mol_type = other DNA
tcgtcgggaagcgctgggcgctcttccacaccaccagcggcgaagcaccg

SEQ ID NO: 60226 - DNA, 50 bp, synthetic construct
  source 1..50: mol_type = other DNA
atgctgatccggcgcatgcgtggccggaaacagaggtcccggaagaggat

SEQ ID NO: 60227 - DNA, 50 bp, synthetic construct
  source 1..50: mol_type = other DNA
aacctcatttacttatgatacggttcaccgtaacgcatctaaatgaggtt

SEQ ID NO: 60228 - DNA, 50 bp, synthetic construct
  source 1..50: mol_type = other DNA
atgaaggcagcggtggttttctcgcaggacaaggccaccgctacctgatc

SEQ ID NO: 60229 - DNA, 50 bp, synthetic construct
  source 1..50: mol_type = other DNA
aatttttttcggtattcaagactagccggaaatgaatacataaaataatt

SEQ ID NO: 60230 - DNA, 50 bp, synthetic construct
  source 1..50: mol_type = other DNA
aaatgaatacctaatgacgggtctaaaaaacatatataatttattcatta

SEQ ID NO: 60231 - DNA, 50 bp, synthetic construct
  source 1..50: mol_type = other DNA
attagatgtttaaaatgatatactatagtgagacatttttttgatgattt

SEQ ID NO: 60232 - DNA, 50 bp, synthetic construct
  source 1..50: mol_type = other DNA
ttttatacacggaaaaaagggtagatgtactcattttgtaaataaaaaaa

SEQ ID NO: 60233 - DNA, 50 bp, synthetic construct
  source 1..50: mol_type = other DNA
gtgtagtaaaaataaaatttcacaaaagtgaagttttatttttactacat

SEQ ID NO: 60234 - DNA, 50 bp, synthetic construct
  source 1..50: mol_type = other DNA
gaaatttgatataatcaatttgcgagcttaaaagatttattataaatgaa

SEQ ID NO: 60235 - DNA, 50 bp, synthetic construct
  source 1..50: mol_type = other DNA
tgtcgtcaccttgttggtgtaattaggttgacgccaacatggtgacgaca

SEQ ID NO: 60236 - DNA, 50 bp, synthetic construct
  source 1..50: mol_type = other DNA
ctcctcattattatttattatacatgccagttgcaggtacaaatgccaag

SEQ ID NO: 60237 - DNA, 50 bp, synthetic construct
  source 1..50: mol_type = other DNA
acttaataaaaaatttacctttcgatttcaaggtaaatgtggcttcaagt

SEQ ID NO: 60238 - DNA, 50 bp, synthetic construct
  source 1..50: mol_type = other DNA
cctggaggtgcagcgcggcgaggacgtcctggccgtccggtacggagtcg

SEQ ID NO: 60239 - DNA, 50 bp, synthetic construct
  source 1..50: mol_type = other DNA
catttttaatcaacatctttctttgaaaaggaagagctgcaataacgccc

SEQ ID NO: 60240 - DNA, 50 bp, synthetic construct
  source 1..50: mol_type = other DNA
agtatttacacttatattatacctctgcgtatcgtcatccgttttatacc

SEQ ID NO: 60241 - DNA, 50 bp, synthetic construct
  source 1..50: mol_type = other DNA
ttccttgtacagtttgttgagtgcaattcgtcaacaaaataatcaagacc

SEQ ID NO: 60242 - DNA, 50 bp, synthetic construct
  source 1..50: mol_type = other DNA
ttcaatatgttaatgcatttccgttgcaggcaacgctggaacagatggaa

SEQ ID NO: 60243 - DNA, 50 bp, synthetic construct
  source 1..50: mol_type = other DNA
acggcgaggagtcgcgccaggcccgcaggccgagcccgaatgagacccgt

SEQ ID NO: 60244 - DNA, 50 bp, synthetic construct
  source 1..50: mol_type = other DNA
agactggggatcggcgaaatccgtcgcgggatggagcagcccggtagctc

SEQ ID NO: 60245 - DNA, 50 bp, synthetic construct
  source 1..50: mol_type = other DNA
tggggtgattccagttatcaaactcttatagattgtctggaataaccccg

SEQ ID NO: 60246 - DNA, 50 bp, synthetic construct
  source 1..50: mol_type = other DNA
tacagtggtttacattggaacggcacgctgttagcatgtataccacagtt

SEQ ID NO: 60247 - DNA, 50 bp, synthetic construct
  source 1..50: mol_type = other DNA
attttaccaaagttcagggaatacgagaaccttaattacttattcaatta

SEQ ID NO: 60248 - DNA, 50 bp, synthetic construct
  source 1..50: mol_type = other DNA
acacagttgtctatttcaaaaagtttaactttataagtagaaaactagta

SEQ ID NO: 60249 - DNA, 50 bp, synthetic construct
  source 1..50: mol_type = other DNA
tatatgcgatactaatagtaacccaagagttagtaatagtatcgcaatct

SEQ ID NO: 60250 - DNA, 50 bp, synthetic construct
  source 1..50: mol_type = other DNA
tcaataaaatcggaagagtcaacaaactttgacagaggagtttttaaagg

SEQ ID NO: 60251 - DNA, 50 bp, synthetic construct
  source 1..50: mol_type = other DNA
agtttgccgcctttagtgcttgaacgtgtagcttggaaagtacccaaaac

SEQ ID NO: 60252 - DNA, 50 bp, synthetic construct
  source 1..50: mol_type = other DNA
ctatttgatataaaaggaaattataagtgatggattttctgattgaaaag

SEQ ID NO: 60253 - DNA, 50 bp, synthetic construct
  source 1..50: mol_type = other DNA
agttatcactatacattagacagacgtctttaagtacagtagcaaatcct

SEQ ID NO: 60254 - DNA, 50 bp, synthetic construct
  source 1..50: mol_type = other DNA
tttacgttaacaatctagtctaggtttaaagaataaaaaattattatata

SEQ ID NO: 60255 - DNA, 50 bp, synthetic construct
  source 1..50: mol_type = other DNA
agttcaattggcacacggaatgttgtgacacgccgtgtggatattagtac

SEQ ID NO: 60256 - DNA, 50 bp, synthetic construct
  source 1..50: mol_type = other DNA
gtataaccgattttcataaacaattctcagtttatgaacaagcacgggga

SEQ ID NO: 60257 - DNA, 50 bp, synthetic construct
  source 1..50: mol_type = other DNA
tctcggaccgtcctaaactgaacccgggttcaggatgatctgccgccaga

SEQ ID NO: 60258 - DNA, 50 bp, synthetic construct
  source 1..50: mol_type = other DNA
ttagtcaaactcctttatgcaagctatgcgtttatgatttgtttgacaaa

SEQ ID NO: 60259 - DNA, 50 bp, synthetic construct
  source 1..50: mol_type = other DNA
cacgttctatatcctgtggcggctcgagaaagctggggataccgaaggtg

SEQ ID NO: 60260 - DNA, 50 bp, synthetic construct
  source 1..50: mol_type = other DNA
acctccttaatattaattatatggttagatatgcggaaaaaagaggagtc

SEQ ID NO: 60261 - DNA, 50 bp, synthetic construct
  source 1..50: mol_type = other DNA
gtgatgggatcttcgtacagcgtaccgtatcggcatttgtaaaccaccag

SEQ ID NO: 60262 - DNA, 50 bp, synthetic construct
  source 1..50: mol_type = other DNA
tgatctggccacagctgattcaggcgccggaacgtagccgggcgcgcgcg

SEQ ID NO: 60263 - DNA, 50 bp, synthetic construct
  source 1..50: mol_type = other DNA
agaatccttgcctcccgaaattccgaggaatttgagaaggttatggtaaa

SEQ ID NO: 60264 - DNA, 50 bp, synthetic construct
  source 1..50: mol_type = other DNA
atccgttaagggtacgagcgtctagtcccgcttcgagtacttgaagggac

SEQ ID NO: 60265 - DNA, 50 bp, synthetic construct
  source 1..50: mol_type = other DNA
aggtataactttaacaacttaacattatttgacttttcaaagttatacct

SEQ ID NO: 60266 - DNA, 50 bp, synthetic construct
  source 1..50: mol_type = other DNA
aagtcccaagtttcaggatgtgtcaatgaacacatccttaattaatcaac

SEQ ID NO: 60267 - DNA, 50 bp, synthetic construct
  source 1..50: mol_type = other DNA
agaataacctcattcttttttattataaccataaagaaaaaacgaatgac

SEQ ID NO: 60268 - DNA, 50 bp, synthetic construct
  source 1..50: mol_type = other DNA
agtagtacctactaatgttaaatagtgacaacacatttgcaggtacaact

SEQ ID NO: 60269 - DNA, 50 bp, synthetic construct
  source 1..50: mol_type = other DNA
cgcaaagagggaaccaaacacttaattaactttttttgcataccaccaga

SEQ ID NO: 60270 - DNA, 50 bp, synthetic construct
  source 1..50: mol_type = other DNA
gcactgtgaataaaacttagagattaacctctaaaatcctctcatagagc

SEQ ID NO: 60271 - DNA, 50 bp, synthetic construct
  source 1..50: mol_type = other DNA
tgtcctctgcaaccttatagtctttgatccttttaagcaggcagaatacg

SEQ ID NO: 60272 - DNA, 50 bp, synthetic construct
  source 1..50: mol_type = other DNA
tcatcgcgcacctccatctcgattgcaccagagaggaaagcgcgcgcctg

SEQ ID NO: 60273 - DNA, 50 bp, synthetic construct
  source 1..50: mol_type = other DNA
gcgtcaccgcgtcgatcttgttctgatcgacgtcatcgaaacggaggtgc

SEQ ID NO: 60274 - DNA, 50 bp, synthetic construct
  source 1..50: mol_type = other DNA
agcagaagtgctgcgagcgcttcgatcgatcagttcatcgggaaacagct

SEQ ID NO: 60275 - DNA, 50 bp, synthetic construct
  source 1..50: mol_type = other DNA
ttttcgagctgctgctcgaactggatactcctatctttgcagaccgaaaa

SEQ ID NO: 60276 - DNA, 50 bp, synthetic construct
  source 1..50: mol_type = other DNA
taaaagatagcatatctgataaattaaatttgcaaatatgctatcatttt

SEQ ID NO: 60277 - DNA, 50 bp, synthetic construct
  source 1..50: mol_type = other DNA
gcgagatggatctcgagaatgtccaacggcatcatccttggtgatggcgg

SEQ ID NO: 60278 - DNA, 50 bp, synthetic construct
  source 1..50: mol_type = other DNA
tttcccgaaaggtgaccgcagaaggacctcagcggtgcattttccgaaca

SEQ ID NO: 60279 - DNA, 50 bp, synthetic construct
  source 1..50: mol_type = other DNA
gagctacttggtgaccgggagtcttcatggaggctgtctccgcgaagcca

SEQ ID NO: 60280 - DNA, 50 bp, synthetic construct
  source 1..50: mol_type = other DNA
cggaggagggttactaacaattgaatgcaattagtagtttttatcccacg

SEQ ID NO: 60281 - DNA, 50 bp, synthetic construct
  source 1..50: mol_type = other DNA
gtcgcgacaccaataccccggcgctggcgaaggctgacgcacgccgcgat

SEQ ID NO: 60282 - DNA, 50 bp, synthetic construct
  source 1..50: mol_type = other DNA
tgccgagcttaaggcgctgttcggctccgaacctgaacggaattaagatc

SEQ ID NO: 60283 - DNA, 50 bp, synthetic construct
  source 1..50: mol_type = other DNA
ccaaagcaagcaccgcccgacatgcgcttttcgagcggcggttcgtttga

SEQ ID NO: 60284 - DNA, 50 bp, synthetic construct
  source 1..50: mol_type = other DNA
tacaccacattctatacaacaacatctgtcattctcttgaatgagggggc

SEQ ID NO: 60285 - DNA, 50 bp, synthetic construct
  source 1..50: mol_type = other DNA
atcgaaataatccacctcaccatccagatgttgaggtggattaatttcta

SEQ ID NO: 60286 - DNA, 50 bp, synthetic construct
  source 1..50: mol_type = other DNA
ctgtgagccttggcgttacaggtatttacctgtaggaatcgtctgcattc

SEQ ID NO: 60287 - DNA, 50 bp, synthetic construct
  source 1..50: mol_type = other DNA
tagtgcggtagaacctagcacggtagaccctgctcttttctaccgagtgc

SEQ ID NO: 60288 - DNA, 50 bp, synthetic construct
  source 1..50: mol_type = other DNA
agctcctcgacggccagaccggccgcctccgccggggcaagcgaaccgta

SEQ ID NO: 60289 - DNA, 50 bp, synthetic construct
  source 1..50: mol_type = other DNA
gaagaaatccggcaagacacccgttccgggtatgcttgccgtggtttctt

SEQ ID NO: 60290 - DNA, 50 bp, synthetic construct
  source 1..50: mol_type = other DNA
caaactattgtattaagttttatcatgatacaaacaaggcgaatactgtt

SEQ ID NO: 60291 - DNA, 50 bp, synthetic construct
  source 1..50: mol_type = other DNA
ttgctcgtcatcactcgcctccttcgaaggtgaagaggcccgacatgccg

SEQ ID NO: 60292 - DNA, 50 bp, synthetic construct
  source 1..50: mol_type = other DNA
gcgctcctttccgcatcgctcaggcctttcagcgctggcaatcatgtcgc

SEQ ID NO: 60293 - DNA, 50 bp, synthetic construct
  source 1..50: mol_type = other DNA
atacggtccgttgtagagaggatcgaattcctcgatccgacgatccgcag

SEQ ID NO: 60294 - DNA, 50 bp, synthetic construct
  source 1..50: mol_type = other DNA
aggccggtgaccctcaaaatatctgccagttcggcgaaggcgtccgggta

SEQ ID NO: 60295 - DNA, 50 bp, synthetic construct
  source 1..50: mol_type = other DNA
ctttttcaaccgtgctatggtatgaacctgaacggtgactacatttctga

SEQ ID NO: 60296 - DNA, 50 bp, synthetic construct
  source 1..50: mol_type = other DNA
tcgaggaccgatacgcagatcttcgcggaggtgtgtcatgaagtccgaac

SEQ ID NO: 60297 - DNA, 50 bp, synthetic construct
  source 1..50: mol_type = other DNA
tactaaatactctaaagaatgtacttagacatttttttgtacaatcagtt

SEQ ID NO: 60298 - DNA, 50 bp, synthetic construct
  source 1..50: mol_type = other DNA
tccaatacttatccgtgttcgcagatctgcgaactgtggacccgtccgat

SEQ ID NO: 60299 - DNA, 50 bp, synthetic construct
  source 1..50: mol_type = other DNA
atgaaagtaaagtaactactatgatattatattaattcgtataatttggc

SEQ ID NO: 60300 - DNA, 50 bp, synthetic construct
  source 1..50: mol_type = other DNA
acaggagaacaatgatatgagtgttaatactcgcgtaatcgctcaggctt

SEQ ID NO: 60301 - DNA, 50 bp, synthetic construct
  source 1..50: mol_type = other DNA
caattttattcctgttaatcttgcgtgtatgattaacaggaataaatgat

SEQ ID NO: 60302 - DNA, 50 bp, synthetic construct
  source 1..50: mol_type = other DNA
tacggcatttctcccaaaaactgcgagcagtttttgttaaaaggccacca

SEQ ID NO: 60303 - DNA, 50 bp, synthetic construct
  source 1..50: mol_type = other DNA
gttctctaccaatagcagtataccacagttaactgattttagtgggaaac

SEQ ID NO: 60304 - DNA, 50 bp, synthetic construct
  source 1..50: mol_type = other DNA
gttgaagtattatggtaaagataaatttatattttccaattgataacaat

SEQ ID NO: 60305 - DNA, 50 bp, synthetic construct
  source 1..50: mol_type = other DNA
aacttgctggttgggggatgcggtaaaccgccagttatccccaataagat

SEQ ID NO: 60306 - DNA, 50 bp, synthetic construct
  source 1..50: mol_type = other DNA
tgagatagaaaagagtgagagttttaaaattatttatattttccaattga

SEQ ID NO: 60307 - DNA, 50 bp, synthetic construct
  source 1..50: mol_type = other DNA
tccttatccaaataaaaatccttcaacaatcatttccgcccttattagga

SEQ ID NO: 60308 - DNA, 50 bp, synthetic construct
  source 1..50: mol_type = other DNA
cggcactcagctattttggctgggtgaatagctagaatagctgagatatc

SEQ ID NO: 60309 - DNA, 50 bp, synthetic construct
  source 1..50: mol_type = other DNA
aataatgcgtactttacccaattaaaaaatttgaactcttctgccgtgga

SEQ ID NO: 60310 - DNA, 50 bp, synthetic construct
  source 1..50: mol_type = other DNA
atattttgtggtaagtgcggtgatatcagacagcgcttcaacgaacccat

SEQ ID NO: 60311 - DNA, 50 bp, synthetic construct
  source 1..50: mol_type = other DNA
ctcagtcaattcaagtccactttggaaatcttgtacttgttttgaccgta

SEQ ID NO: 60312 - DNA, 50 bp, synthetic construct
  source 1..50: mol_type = other DNA
ttgtaatcatcttcacttctcactaaattaatgtctggcgttgattaaaa

SEQ ID NO: 60313 - DNA, 50 bp, synthetic construct
  source 1..50: mol_type = other DNA
cgacgattgtcaacgtcatcatccccactccacgaagttgacttgcgttt

SEQ ID NO: 60314 - DNA, 50 bp, synthetic construct
  source 1..50: mol_type = other DNA
gaaggaaactgttttttattagcgaactataacgccaacaaaattctttg

SEQ ID NO: 60315 - DNA, 50 bp, synthetic construct
  source 1..50: mol_type = other DNA
tacaggtaaatattgccaactagtgtaatagtcggtaacatttacctttc

SEQ ID NO: 60316 - DNA, 50 bp, synthetic construct
  source 1..50: mol_type = other DNA
gaagcgccgagatagtgcattgtaattataatgcactcgtaatctgagag

SEQ ID NO: 60317 - DNA, 50 bp, synthetic construct
  source 1..50: mol_type = other DNA
taaaagaatcattgataaccttagtgttaatcttaaactgtgattttttt

SEQ ID NO: 60318 - DNA, 50 bp, synthetic construct
  source 1..50: mol_type = other DNA
tgaagccaaagcggtggggtcgcttttgcaacccgcttgttgtggcttcg

SEQ ID NO: 60319 - DNA, 50 bp, synthetic construct
  source 1..50: mol_type = other DNA
ctgaatattgtatcatttattttgtacaaaacagattataaaaaatctac

SEQ ID NO: 60320 - DNA, 50 bp, synthetic construct
  source 1..50: mol_type = other DNA
aattagccatgaactgcttcatgcccgccataagctgttttatccccaat

SEQ ID NO: 60321 - DNA, 50 bp, synthetic construct
  source 1..50: mol_type = other DNA
ctttgttgggacaatgaaagtaccgtggagacttgtgtgttgctacaaag

SEQ ID NO: 60322 - DNA, 50 bp, synthetic construct
  source 1..50: mol_type = other DNA
ggttccgtaagcgccggaacggggcgtcccgccgatggcctatctgaccc

SEQ ID NO: 60323 - DNA, 50 bp, synthetic construct
  source 1..50: mol_type = other DNA
tggtgcaattatataaccaccttgtccatcgtcgggaattaattgcactc

SEQ ID NO: 60324 - DNA, 50 bp, synthetic construct
  source 1..50: mol_type = other DNA
accagccgatggtcggcgtagaccgtcgggcttgtagcttttaggggaaa

SEQ ID NO: 60325 - DNA, 50 bp, synthetic construct
  source 1..50: mol_type = other DNA
gatggcataagccgaataaacctccggagaggtaatctgcaaatatcctc

SEQ ID NO: 60326 - DNA, 50 bp, synthetic construct
  source 1..50: mol_type = other DNA
ttattgttctaggtgcaaaggcttaaaaacccctctaactccttggatta

SEQ ID NO: 60327 - DNA, 50 bp, synthetic construct
  source 1..50: mol_type = other DNA
gccatatactttttggatataccattatttatccctaaaaagggttttga

SEQ ID NO: 60328 - DNA, 50 bp, synthetic construct
  source 1..50: mol_type = other DNA
aggtgactaaaaatatgccgagaccaggcagagtatgcttatagtcttat

SEQ ID NO: 60329 - DNA, 50 bp, synthetic construct
  source 1..50: mol_type = other DNA
aaaaatgtctaagattggatttatataaattatgccctctaaacatacgc

SEQ ID NO: 60330 - DNA, 50 bp, synthetic construct
  source 1..50: mol_type = other DNA
acttcttatttggtttctttccattattcaaatattttcaaacttattat

SEQ ID NO: 60331 - DNA, 50 bp, synthetic construct
  source 1..50: mol_type = other DNA
tcttatagcaataattctgaaagaatttctgctactatattcactgatga

SEQ ID NO: 60332 - DNA, 50 bp, synthetic construct
  source 1..50: mol_type = other DNA
ttgcgagttaccgcgtggcgatggcggtgccgcaggctcgtacggtggaa

SEQ ID NO: 60333 - DNA, 50 bp, synthetic construct
  source 1..50: mol_type = other DNA
aacgtacaacatgacgatgttatttcaataacatcatcatgttgtacgta

SEQ ID NO: 60334 - DNA, 50 bp, synthetic construct
  source 1..50: mol_type = other DNA
gcgcgaacggtcttcccatattcgttcttctatggaaggtccattcacaa

SEQ ID NO: 60335 - DNA, 50 bp, synthetic construct
  source 1..50: mol_type = other DNA
ggccttattttgctctattttgaacgtttgcgaactgaagtaatcgggct

SEQ ID NO: 60336 - DNA, 50 bp, synthetic construct
  source 1..50: mol_type = other DNA
ttgtgtgcttcaaactatactacattcatcgtgtgttttcaagcacacaa

SEQ ID NO: 60337 - DNA, 50 bp, synthetic construct
  source 1..50: mol_type = other DNA
ttcagatccagaacgggaaaggcatcagtagctccgtttcttttttagaa

SEQ ID NO: 60338 - DNA, 50 bp, synthetic construct
  source 1..50: mol_type = other DNA
agctgggcgggtgacagtttttccgcggagaaaccaaaacactttaagcg

SEQ ID NO: 60339 - DNA, 50 bp, synthetic construct
  source 1..50: mol_type = other DNA
cacgctgatatcggcggacggcatcgaaacaggccgccggcagcagcgcg

SEQ ID NO: 60340 - DNA, 50 bp, synthetic construct
  source 1..50: mol_type = other DNA
aattaatatttatttaacaagtagataaaccctttaaaacaaaggtaatt

SEQ ID NO: 60341 - DNA, 50 bp, synthetic construct
  source 1..50: mol_type = other DNA
gagaaattctttttctccttttttaagaaaggggatttttagaatggctc

SEQ ID NO: 60342 - DNA, 50 bp, synthetic construct
  source 1..50: mol_type = other DNA
cactaatccctctccatatatgagttgaggtatatgaaacaggaatactg

SEQ ID NO: 60343 - DNA, 50 bp, synthetic construct
  source 1..50: mol_type = other DNA
gatctacccaaaaaattacaggttaatacctgtaagaaacgggcttacag

SEQ ID NO: 60344 - DNA, 50 bp, synthetic construct
  source 1..50: mol_type = other DNA
gtgtgagattcacccctaccattcgagactggtaggtggtattctcacac

SEQ ID NO: 60345 - DNA, 50 bp, synthetic construct
  source 1..50: mol_type = other DNA
agggccgctcaggcggccgcgggcgctctcgcgattcggcaagcaaggct

SEQ ID NO: 60346 - DNA, 50 bp, synthetic construct
  source 1..50: mol_type = other DNA
cattgtccgcctcctttctgccgtcgacacggattgtagacgccgtcatg

SEQ ID NO: 60347 - DNA, 50 bp, synthetic construct
  source 1..50: mol_type = other DNA
gcgctcatccgctgcccgatggcccatcccttcgggcagcggccagctca

SEQ ID NO: 60348 - DNA, 50 bp, synthetic construct
  source 1..50: mol_type = other DNA
aatgactcaggtccgccgaagccgcgccgcctcggcctgccggagttcca

SEQ ID NO: 60349 - DNA, 50 bp, synthetic construct
  source 1..50: mol_type = other DNA
gcgcagttccagccgatacattatgcgatctgttgagcacggaacgagaa

SEQ ID NO: 60350 - DNA, 50 bp, synthetic construct
  source 1..50: mol_type = other DNA
cgctatccggcaggcggtgccaatcgattgttaccgcggagatttcgcct

SEQ ID NO: 60351 - DNA, 50 bp, synthetic construct
  source 1..50: mol_type = other DNA
caatcacataagagtgcccagtttcaaaactgggcactcctgccgcagca

SEQ ID NO: 60352 - DNA, 50 bp, synthetic construct
  source 1..50: mol_type = other DNA
atcaggcctaaattagtacacctaagcaagtttacccatttaggggtact

SEQ ID NO: 60353 - DNA, 50 bp, synthetic construct
  source 1..50: mol_type = other DNA
gacagcacttatttctcaccaatggagatggttgatctatttgtgcagta

SEQ ID NO: 60354 - DNA, 50 bp, synthetic construct
  source 1..50: mol_type = other DNA
tgtgtaaacgtatcagagcctgtatacacacagtctcatacgttatcacg

SEQ ID NO: 60355 - DNA, 50 bp, synthetic construct
  source 1..50: mol_type = other DNA
ttataaaaaaggttaatattgcatgtatgtaacatttaccttttaagagt

SEQ ID NO: 60356 - DNA, 50 bp, synthetic construct
  source 1..50: mol_type = other DNA
cacatgcacacccattcttttagtgagctaatagcttaggtgtgcatatg

SEQ ID NO: 60357 - DNA, 50 bp, synthetic construct
  source 1..50: mol_type = other DNA
accgatgacgaaaaaaagtgtacaaacgcatcacgtggagtgtgtagtgt

SEQ ID NO: 60358 - DNA, 50 bp, synthetic construct
  source 1..50: mol_type = other DNA
ggtttttatttctgctacttttttgcagaaaaatggaggaaataatgatg

SEQ ID NO: 60359 - DNA, 50 bp, synthetic construct
  source 1..50: mol_type = other DNA
ttacataactatttgcctctatcacttatgacaaaaaagaggttattgtt

SEQ ID NO: 60360 - DNA, 50 bp, synthetic construct
  source 1..50: mol_type = other DNA
ttatttttgatttttagcgtttttagcacaacgcaaaaaatcaatttata

SEQ ID NO: 60361 - DNA, 50 bp, synthetic construct
  source 1..50: mol_type = other DNA
agacttagaaaagaaagtcgctgaaacgaggaactaaacaatctaaataa

SEQ ID NO: 60362 - DNA, 50 bp, synthetic construct
  source 1..50: mol_type = other DNA
aaaaaaaataaccgtatctcgtttaaagctctcataaagggctttttctt

SEQ ID NO: 60363 - DNA, 50 bp, synthetic construct
  source 1..50: mol_type = other DNA
tttcgcacatacgttctttttttggtaatttctcgaattctttccgaaaa

SEQ ID NO: 60364 - DNA, 50 bp, synthetic construct
  source 1..50: mol_type = other DNA
agctctaagctgttgtttcatgtatgcacacacaacaacaaagattcaga

SEQ ID NO: 60365 - DNA, 50 bp, synthetic construct
  source 1..50: mol_type = other DNA
caaacggggtgtttttgttcgaaacgggggcaccaaagtagccaatttca

SEQ ID NO: 60366 - DNA, 50 bp, synthetic construct
  source 1..50: mol_type = other DNA
ctcgtcgccggtgcgcgagccaccagccgggccctcgcctccgcgccgag

SEQ ID NO: 60367 - DNA, 50 bp, synthetic construct
  source 1..50: mol_type = other DNA
ttttttagttttatttgtgatacgcttaccaatgaaattactaaagtaaa

SEQ ID NO: 60368 - DNA, 50 bp, synthetic construct
  source 1..50: mol_type = other DNA
gctcctgtgtgcctcatacagccacttggaagaaacagtatcactgcagc

SEQ ID NO: 60369 - DNA, 50 bp, synthetic construct
  source 1..50: mol_type = other DNA
aacttagtgagttattagcaatgatattatttactttactttcctttact

SEQ ID NO: 60370 - DNA, 50 bp, synthetic construct
  source 1..50: mol_type = other DNA
ctattttcatgagaagtttacaccttacaagctccggataatcaaaattc

SEQ ID NO: 60371 - DNA, 50 bp, synthetic construct
  source 1..50: mol_type = other DNA
ttttctgaattaccacacaatctaatttcctttcctgtcttatcaatcaa

SEQ ID NO: 60372 - DNA, 50 bp, synthetic construct
  source 1..50: mol_type = other DNA
cgcaaaaaatgaccgactgattatggtagttgcactggtgtaggacggat

SEQ ID NO: 60373 - DNA, 50 bp, synthetic construct
  source 1..50: mol_type = other DNA
aaaggatttctacgagtttttcttttccacatgcgtcgtctccgtccttg

SEQ ID NO: 60374 - DNA, 50 bp, synthetic construct
  source 1..50: mol_type = other DNA
tgttcgggaattccgaacaactgaattttcctgtaattgctcaaattcag

SEQ ID NO: 60375 - DNA, 50 bp, synthetic construct
  source 1..50: mol_type = other DNA
gaagattgattgagtcacattaatatcaacagtctgaataatcaagatga

SEQ ID NO: 60376 - DNA, 50 bp, synthetic construct
  source 1..50: mol_type = other DNA
tacgcgtatacagctttgatgactttcgtcattcaatataagcatccgtg

SEQ ID NO: 60377 - DNA, 50 bp, synthetic construct
  source 1..50: mol_type = other DNA
caagcatggctcgcagcatacatgttcatctattaagcaatcgatgattg

SEQ ID NO: 60378 - DNA, 50 bp, synthetic construct
  source 1..50: mol_type = other DNA
atattcaaagtatagcgatatgtgaaattataaatatatattatctatat

SEQ ID NO: 60379 - DNA, 50 bp, synthetic construct
  source 1..50: mol_type = other DNA
gtgcgcgaaagccgcgagcgcgtgcgtacgcggttccgagcttcgcgtac

SEQ ID NO: 60380 - DNA, 50 bp, synthetic construct
  source 1..50: mol_type = other DNA
tccctcgtggatagaggcttttatattaaaatttccatattcataattca

SEQ ID NO: 60381 - DNA, 50 bp, synthetic construct
  source 1..50: mol_type = other DNA
gcggtccggaacgatcctcaccccgcgtggtgagacacatacgggaaggc

SEQ ID NO: 60382 - DNA, 50 bp, synthetic construct
  source 1..50: mol_type = other DNA
caaagcacgctgcaggccgaagcggccacagggtgaccagcagatctgtc

SEQ ID NO: 60383 - DNA, 50 bp, synthetic construct
  source 1..50: mol_type = other DNA
tgagctatagccccgcgccaattccgaccttgagcccggcctcgcgcacg

SEQ ID NO: 60384 - DNA, 50 bp, synthetic construct
  source 1..50: mol_type = other DNA
atgtccagatttcccccagaaaaatgtttttcttcgagcattccgggcat

SEQ ID NO: 60385 - DNA, 50 bp, synthetic construct
  source 1..50: mol_type = other DNA
cgtaagaaattttgaaatctgacagatgtagaaattcgaaatttcttacg

SEQ ID NO: 60386 - DNA, 50 bp, synthetic construct
  source 1..50: mol_type = other DNA
atgtaatgacataaaacatgtatgtacatattctttatcggacataatga

SEQ ID NO: 60387 - DNA, 50 bp, synthetic construct
  source 1..50: mol_type = other DNA
ttctaagtagtttcaaggatgtagtgctatatgtacgaaactactgagtc

SEQ ID NO: 60388 - DNA, 50 bp, synthetic construct
  source 1..50: mol_type = other DNA
agtgtcaatgtgttaggtgcattaattaaggcaattaccacattcaatcg

SEQ ID NO: 60389 - DNA, 50 bp, synthetic construct
  source 1..50: mol_type = other DNA
taataataatgtattttttacccttaaataaaaaaaagaccaggatatta

SEQ ID NO: 60390 - DNA, 50 bp, synthetic construct
  source 1..50: mol_type = other DNA
acacctcgctttctatcaaactatacttaatttgtaataacccaaggtgt

SEQ ID NO: 60391 - DNA, 50 bp, synthetic construct
  source 1..50: mol_type = other DNA
ttacatatatcactctaaaaggcaattcgtaacgagatagattgcaataa

SEQ ID NO: 60392 - DNA, 50 bp, synthetic construct
  source 1..50: mol_type = other DNA
gatcaggcggctttcttgccgatcagcgggatcacatcgtcgacgttggg

SEQ ID NO: 60393 - DNA, 50 bp, synthetic construct
  source 1..50: mol_type = other DNA
aaggtcgaatcttacaggtattataggtttaacctgtaattttttgggta

SEQ ID NO: 60394 - DNA, 50 bp, synthetic construct
  source 1..50: mol_type = other DNA
gctcctattgatgcaggggcggtttccgccgcctggatattctgcaggag

SEQ ID NO: 60395 - DNA, 50 bp, synthetic construct
  source 1..50: mol_type = other DNA
aaaaataataatatatgtcaataatatgtaagatatatatactcagctgt

SEQ ID NO: 60396 - DNA, 50 bp, synthetic construct
  source 1..50: mol_type = other DNA
tgtcacattttctgtaaaaggtatacatacctttagccaataatgagcat

SEQ ID NO: 60397 - DNA, 50 bp, synthetic construct
  source 1..50: mol_type = other DNA
atcaggagtgtaaagctcaactttcgctagttgaggattacaccccttac

SEQ ID NO: 60398 - DNA, 50 bp, synthetic construct
  source 1..50: mol_type = other DNA
ataatcattgaggaactcattatgtcttgtgtgagttgcttatcagagtg

SEQ ID NO: 60399 - DNA, 50 bp, synthetic construct
  source 1..50: mol_type = other DNA
attcagccctaaagcatcattcgtcgaaagaaacaccttttgttctttgt

SEQ ID NO: 60400 - DNA, 50 bp, synthetic construct
  source 1..50: mol_type = other DNA
ttgaaccaacagtttatcgttatgaagataacgtcaaacacgtcatctcc

SEQ ID NO: 60401 - DNA, 50 bp, synthetic construct
  source 1..50: mol_type = other DNA
tgcgatatttggttcggcgtcaccgacgccgcgccgaagcagccagcaaa

SEQ ID NO: 60402 - DNA, 50 bp, synthetic construct
  source 1..50: mol_type = other DNA
taataagggtaattaaggtagttaaataactaataattaagtatttattt

SEQ ID NO: 60403 - DNA, 50 bp, synthetic construct
  source 1..50: mol_type = other DNA
tacaggtattatacgccggacttgatcaagtcggaagcgtttaacctgta

SEQ ID NO: 60404 - DNA, 50 bp, synthetic construct
  source 1..50: mol_type = other DNA
gtgatggcggagagctgatctgaaagcatagaggagcttgccgatgacaa

SEQ ID NO: 60405 - DNA, 50 bp, synthetic construct
  source 1..50: mol_type = other DNA
agatttgacttttgtgatttcaagttcttgaaaaaagctaaggttaaagc

SEQ ID NO: 60406 - DNA, 50 bp, synthetic construct
  source 1..50: mol_type = other DNA
caagaaaacatctcaaaaggtaatattttacattatggagtgattatttg

SEQ ID NO: 60407 - DNA, 50 bp, synthetic construct
  source 1..50: mol_type = other DNA
tccactggaccttttgactcccgcagcgttgatacaaagagtgaaatagt

SEQ ID NO: 60408 - DNA, 50 bp, synthetic construct
  source 1..50: mol_type = other DNA
ggtttggacaacgatgaacacgttgagacggtagcacttttgtccaaact

SEQ ID NO: 60409 - DNA, 50 bp, synthetic construct
  source 1..50: mol_type = other DNA
tttagtacctcatttcctctcattggaagaagaagaaacgagatactaaa

SEQ ID NO: 60410 - DNA, 50 bp, synthetic construct
  source 1..50: mol_type = other DNA
gctattttggacggggatttctttaaatgcagctgatggtcacccatcag

SEQ ID NO: 60411 - DNA, 50 bp, synthetic construct
  source 1..50: mol_type = other DNA
attttatctcgtttgtaccccttgtacaaagggaacataataaaaaactt

SEQ ID NO: 60412 - DNA, 50 bp, synthetic construct
  source 1..50: mol_type = other DNA
agtattaacaataaaatattgtattagtacaatattttattataaaaatt

SEQ ID NO: 60413 - DNA, 50 bp, synthetic construct
  source 1..50: mol_type = other DNA
tcttttggtaatttcagaagaacctatgttcttatgagttgcactaaaca

SEQ ID NO: 60414 - DNA, 50 bp, synthetic construct
  source 1..50: mol_type = other DNA
attcccatacggcctttacgcttggcataaaatcaattctaagcccttca

SEQ ID NO: 60415 - DNA, 50 bp, synthetic construct
  source 1..50: mol_type = other DNA
cacctggaagccgtcacgaactacatggcggactgttcggcttccgcttc

SEQ ID NO: 60416 - DNA, 50 bp, synthetic construct
  source 1..50: mol_type = other DNA
cccgcattctgcaggcggctttgctggcggatctggctgtcgatcgctgg

SEQ ID NO: 60417 - DNA, 50 bp, synthetic construct
  source 1..50: mol_type = other DNA
cctgatgtcgtcgcgctgctcgttacatcgaggatgtgcgttccatgtgc

SEQ ID NO: 60418 - DNA, 50 bp, synthetic construct
  source 1..50: mol_type = other DNA
ttcttattgggctaaccataaaccagtgttgctttacgcaggtatgccca

SEQ ID NO: 60419 - DNA, 50 bp, synthetic construct
  source 1..50: mol_type = other DNA
tgctacatttgggggtgcctgccgtccggcagctccccctatatgtgaca

SEQ ID NO: 60420 - DNA, 50 bp, synthetic construct
  source 1..50: mol_type = other DNA
ctgttgaacactcagcatatgctgctgttccccagggaacaggtcaatag

SEQ ID NO: 60421 - DNA, 50 bp, synthetic construct
  source 1..50: mol_type = other DNA
cttactgatggctttctggacggcatgctcagtagaaactctgcagtaag

SEQ ID NO: 60422 - DNA, 50 bp, synthetic construct
  source 1..50: mol_type = other DNA
tcacctgataaagcctgttaataacaatctaggtatcagttttgaggtgg

SEQ ID NO: 60423 - DNA, 50 bp, synthetic construct
  source 1..50: mol_type = other DNA
attatatcgctcgtaagagcggtcaaaaccactccgaagagtggctttta

SEQ ID NO: 60424 - DNA, 50 bp, synthetic construct
  source 1..50: mol_type = other DNA
tctcatttaaagatgaacttataaacgtatgaggtaatttatgaatgaaa

SEQ ID NO: 60425 - DNA, 50 bp, synthetic construct
  source 1..50: mol_type = other DNA
ttataaaatgtagtataacatgcagttgccatttttcgcaactaggattg

SEQ ID NO: 60426 - DNA, 50 bp, synthetic construct
  source 1..50: mol_type = other DNA
tttatgggtcttttaggtattaaaaatcttagatataatagacccacatt

SEQ ID NO: 60427 - DNA, 50 bp, synthetic construct
  source 1..50: mol_type = other DNA
ggaaccgatttctcggttcccgtaattatgggaactgggaaatagtatct

SEQ ID NO: 60428 - DNA, 50 bp, synthetic construct
  source 1..50: mol_type = other DNA
tatctactattcttttcgtatggttgtccatacgcaaaaaataaacaact

SEQ ID NO: 60429 - DNA, 50 bp, synthetic construct
  source 1..50: mol_type = other DNA
ttcattggtttaattgctattgggtacccaaaaatatcccctcaaattac

SEQ ID NO: 60430 - DNA, 50 bp, synthetic construct
  source 1..50: mol_type = other DNA
ctttctttgaaatcgttaattggaaaaaatatcaaccatttataagtcaa

SEQ ID NO: 60431 - DNA, 50 bp, synthetic construct
  source 1..50: mol_type = other DNA
atttactaatgttataaattggaatatagaaagcgataaaaaaggtagga

SEQ ID NO: 60432 - DNA, 50 bp, synthetic construct
  source 1..50: mol_type = other DNA
taatttcataaaaaaataatgactatagttgtgaattatataaaaaagac

SEQ ID NO: 60433 - DNA, 50 bp, synthetic construct
  source 1..50: mol_type = other DNA
aatatcctccttatgttcttttagaaccgccccagcgtagacaggtcagc

SEQ ID NO: 60434 - DNA, 50 bp, synthetic construct
  source 1..50: mol_type = other DNA
aactgttatcgtcaaactgataaccaatagtcagttccatgataacagtt

SEQ ID NO: 60435 - DNA, 50 bp, synthetic construct
  source 1..50: mol_type = other DNA
atctttctaatttcaaatttagtaggtatcacgcaagaaattaatactat

SEQ ID NO: 60436 - DNA, 50 bp, synthetic construct
  source 1..50: mol_type = other DNA
ttttgcaggtattaggaagttgtatggcctttttttcgatgtgtgcaagt

SEQ ID NO: 60437 - DNA, 50 bp, synthetic construct
  source 1..50: mol_type = other DNA
cacccggtactggtccccgcaggccgtcctgacgggatgcgtttcggcat

SEQ ID NO: 60438 - DNA, 50 bp, synthetic construct
  source 1..50: mol_type = other DNA
attctggagagtttaaaattaacttaagttaataaatataaaattgtata

SEQ ID NO: 60439 - DNA, 50 bp, synthetic construct
  source 1..50: mol_type = other DNA
tttttggaataatttcagacatacttgtccatttataattactcctaatt

SEQ ID NO: 60440 - DNA, 50 bp, synthetic construct
  source 1..50: mol_type = other DNA
aagaggtaagtaaaaatggtgttgataaacactgcttttagagtgatgaa

SEQ ID NO: 60441 - DNA, 50 bp, synthetic construct
  source 1..50: mol_type = other DNA
tgttttttatgctcaagaatcaagctgttgacttgtgagcataacaacgt

SEQ ID NO: 60442 - DNA, 50 bp, synthetic construct
  source 1..50: mol_type = other DNA
atattatatcctccaaagtttaaatattttaaatttttctttaaaactaa

SEQ ID NO: 60443 - DNA, 50 bp, synthetic construct
  source 1..50: mol_type = other DNA
tattgtaataacctgaatagttgcttaacctaaaataggtctcttttcta

SEQ ID NO: 60444 - DNA, 50 bp, synthetic construct
  source 1..50: mol_type = other DNA
ttattttgtttaataaacatgaacatcttgtagtttgttaacaagaatag

SEQ ID NO: 60445 - DNA, 50 bp, synthetic construct
  source 1..50: mol_type = other DNA
tgttacgacaaaggtggctcagggttcccaggaccacctttgttgtaact

SEQ ID NO: 60446 - DNA, 50 bp, synthetic construct
  source 1..50: mol_type = other DNA
caatatctttaactatgtgataccgggggttcacttagataaagatacca

SEQ ID NO: 60447 - DNA, 50 bp, synthetic construct
  source 1..50: mol_type = other DNA
tatcggcgtgcccagccgaggaccgaagcgatggcgggccgcgccagacc

SEQ ID NO: 60448 - DNA, 50 bp, synthetic construct
  source 1..50: mol_type = other DNA
ttctatggagcgaaacaatggcggggccgccaccacatgcaggttcgcgt

SEQ ID NO: 60449 - DNA, 50 bp, synthetic construct
  source 1..50: mol_type = other DNA
ggtgttctagtacgtctgatctggtgtagcggtggacgccggtggactca

SEQ ID NO: 60450 - DNA, 50 bp, synthetic construct
  source 1..50: mol_type = other DNA
ttgtgtcaactagcgagttatattatcatggcagtcggaggataacactg

SEQ ID NO: 60451 - DNA, 50 bp, synthetic construct
  source 1..50: mol_type = other DNA
gtttctgccggtcaactatggcctgactgaagaaggtttacggcagaaaa

SEQ ID NO: 60452 - DNA, 50 bp, synthetic construct
  source 1..50: mol_type = other DNA
agggtagtttaacaacttatgaccttagtggcaagtcaggaacctacccc

SEQ ID NO: 60453 - DNA, 50 bp, synthetic construct
  source 1..50: mol_type = other DNA
tttgtctaaaagtttgtgggcttagtagagctataaaactaagtatgtcc

SEQ ID NO: 60454 - DNA, 50 bp, synthetic construct
  source 1..50: mol_type = other DNA
cttgcgggggtttgagaagcacccagcgtcgttgttcaaaccaccgacgt

SEQ ID NO: 60455 - DNA, 50 bp, synthetic construct
  source 1..50: mol_type = other DNA
agggctgcgcggcgaacactcatcttcaatatcgttggccgtccgcaccg

SEQ ID NO: 60456 - DNA, 50 bp, synthetic construct
  source 1..50: mol_type = other DNA
aagaagttacattataaattatcgctgtatagcgttaaaagtaactttca

SEQ ID NO: 60457 - DNA, 50 bp, synthetic construct
  source 1..50: mol_type = other DNA
ccttggatagaaaacttcaaatatcgttgtttgaagtttctcggggatgc

SEQ ID NO: 60458 - DNA, 50 bp, synthetic construct
  source 1..50: mol_type = other DNA
ggtaggtaattgtaacaacacttcttgaatttctgccacaaatacctacc

SEQ ID NO: 60459 - DNA, 50 bp, synthetic construct
  source 1..50: mol_type = other DNA
aaaagatatgactggcgaggtcatttattaccttgccagatagaatgttt

SEQ ID NO: 60460 - DNA, 50 bp, synthetic construct
  source 1..50: mol_type = other DNA
atgatgaatgataaagggccgccagcggttttcctgtctttattcatcca

SEQ ID NO: 60461 - DNA, 50 bp, synthetic construct
  source 1..50: mol_type = other DNA
taccatataggtttatttccgcctttcatcggtgtttattctttggggat

SEQ ID NO: 60462 - DNA, 50 bp, synthetic construct
  source 1..50: mol_type = other DNA
gaaacatgcgattttcagatttctcatcacatccctgtatcccatttccc

SEQ ID NO: 60463 - DNA, 50 bp, synthetic construct
  source 1..50: mol_type = other DNA
cggcagtccaaatcactacgcagccaagtagatatagatttgatgatccg

SEQ ID NO: 60464 - DNA, 50 bp, synthetic construct
  source 1..50: mol_type = other DNA
tccgttccagcactcttcgcttgcgacggagccaggtgttaaggaatagg

SEQ ID NO: 60465 - DNA, 50 bp, synthetic construct
  source 1..50: mol_type = other DNA
gaaagctttatccgttttataaaggtacgtgtaaaagcgataacaccaat

SEQ ID NO: 60466 - DNA, 50 bp, synthetic construct
  source 1..50: mol_type = other DNA
gccggaatccggtcgagccgttccgtgggagcagtcgtatcgcttgaggc

SEQ ID NO: 60467 - DNA, 50 bp, synthetic construct
  source 1..50: mol_type = other DNA
ccggacaggcgcccggtcagctcgcccggtccccttctatcactgcttgg

SEQ ID NO: 60468 - DNA, 50 bp, synthetic construct
  source 1..50: mol_type = other DNA
tccgctgaccttcgcctgataatccgggcgtgcaggcggcgtcgagcgcc

SEQ ID NO: 60469 - DNA, 50 bp, synthetic construct
  source 1..50: mol_type = other DNA
gaaggcgatcgcttccggtgaggatttcctcgcgggcggcgcctagcata

SEQ ID NO: 60470 - DNA, 50 bp, synthetic construct
  source 1..50: mol_type = other DNA
gcgccagcatgcgctgcgtctgaacgagcctgggcagcgcagacacttcg

SEQ ID NO: 60471 - DNA, 50 bp, synthetic construct
  source 1..50: mol_type = other DNA
acgtaataatataacactaagattgcattaaacgagagaaagccaatagg

SEQ ID NO: 60472 - DNA, 50 bp, synthetic construct
  source 1..50: mol_type = other DNA
gctcatcatagtaatcctggacatcggcgtcggcgagcagcgcgatggag

SEQ ID NO: 60473 - DNA, 50 bp, synthetic construct
  source 1..50: mol_type = other DNA
accacaaaatgtaagttatcactatacagtgcataactacaaagacgggt

SEQ ID NO: 60474 - DNA, 50 bp, synthetic construct
  source 1..50: mol_type = other DNA
gggttaaatgatgccacggcataacgttagcaggtgtcaccatgaaaaaa

SEQ ID NO: 60475 - DNA, 50 bp, synthetic construct
  source 1..50: mol_type = other DNA
ttgtttgtataagcataacacacttgagtgtgtatcgcttattacaacat

SEQ ID NO: 60476 - DNA, 50 bp, synthetic construct
  source 1..50: mol_type = other DNA
gatgtagctgattgcccgtctcatatatgaatgaacgacagagaatttca

SEQ ID NO: 60477 - DNA, 50 bp, synthetic construct
  source 1..50: mol_type = other DNA
gcatgatttatttatttgtatagcattgtaaacaaacaaatttatcatac

SEQ ID NO: 60478 - DNA, 50 bp, synthetic construct
  source 1..50: mol_type = other DNA
caaaaaccgcatcattaactgataagcatatcataagtgatgcggttttt

SEQ ID NO: 60479 - DNA, 50 bp, synthetic construct
  source 1..50: mol_type = other DNA
gccgttgataatactggttttcatatcagaatcgaagtctaagaggatgc

SEQ ID NO: 60480 - DNA, 50 bp, synthetic construct
  source 1..50: mol_type = other DNA
ttcttgctatttcgttgcttttgaaatttacagcaaagaaaaagcagctt

SEQ ID NO: 60481 - DNA, 50 bp, synthetic construct
  source 1..50: mol_type = other DNA
gcattttatcagttatcttttcttccgttaaaaaggaagtgaatctatga

SEQ ID NO: 60482 - DNA, 50 bp, synthetic construct
  source 1..50: mol_type = other DNA
acggccctctgggcgtcgagttcaagtgaggtgcctgccatgaccgccgt

SEQ ID NO: 60483 - DNA, 50 bp, synthetic construct
  source 1..50: mol_type = other DNA
ccgcaagcaaggcccgcccttttgcgtatggcggcggccgatgctgttcg

SEQ ID NO: 60484 - DNA, 50 bp, synthetic construct
  source 1..50: mol_type = other DNA
agcgggacggtgcagaactcgaacaggttcgagtcctgtaccgtccacca

SEQ ID NO: 60485 - DNA, 50 bp, synthetic construct
  source 1..50: mol_type = other DNA
ggaaattcctcttttgcgcccggagatccgggcgcggagcaggttcatct

SEQ ID NO: 60486 - DNA, 50 bp, synthetic construct
  source 1..50: mol_type = other DNA
taaacaaatttagatacacttgtttcacttctgcaatactggcggatagg

SEQ ID NO: 60487 - DNA, 50 bp, synthetic construct
  source 1..50: mol_type = other DNA
ttttctgaatttgagatatgattgtttttacgtacttcaaattcacaatt

SEQ ID NO: 60488 - DNA, 50 bp, synthetic construct
  source 1..50: mol_type = other DNA
gcttgtcgactttttttaaaaattttttgctttgaaatcagctaaccatt

SEQ ID NO: 60489 - DNA, 50 bp, synthetic construct
  source 1..50: mol_type = other DNA
tcaattagagtaaatgcttgtcgactttgccaagcatttctgctgcccgc

SEQ ID NO: 60490 - DNA, 50 bp, synthetic construct
  source 1..50: mol_type = other DNA
tgctttccggttcttgccctcctgatcaggacaggaagaaaatcaaagta

SEQ ID NO: 60491 - DNA, 50 bp, synthetic construct
  source 1..50: mol_type = other DNA
acattattaattaaggaggtcattatagcgttttcgggaattaataaaaa

SEQ ID NO: 60492 - DNA, 50 bp, synthetic construct
  source 1..50: mol_type = other DNA
catctatgcggatgagggcatctcaggaactgtttcatcatcagtagata

SEQ ID NO: 60493 - DNA, 50 bp, synthetic construct
  source 1..50: mol_type = other DNA
atgatgaatgaacagtatcaaatcgttgttttcatcccttacacctatat

SEQ ID NO: 60494 - DNA, 50 bp, synthetic construct
  source 1..50: mol_type = other DNA
actcgacaatatgcggctactttgatcaatgttctcgcttagtagctcta

SEQ ID NO: 60495 - DNA, 50 bp, synthetic construct
  source 1..50: mol_type = other DNA
atgattgaaaaactactaagttgtaattaacttggttttcataacttgat

SEQ ID NO: 60496 - DNA, 50 bp, synthetic construct
  source 1..50: mol_type = other DNA
aatagtgtcagttgcttgacataagattgtgtcataataatgacaggtgc

SEQ ID NO: 60497 - DNA, 50 bp, synthetic construct
  source 1..50: mol_type = other DNA
aattggagaatttaggtcagaaaaatttttcttcttttggtttatcaacg

SEQ ID NO: 60498 - DNA, 50 bp, synthetic construct
  source 1..50: mol_type = other DNA
caacactacacactccacgtgatgcgttgttttctttatttgtacacttt

SEQ ID NO: 60499 - DNA, 50 bp, synthetic construct
  source 1..50: mol_type = other DNA
tgagatagaaaagagtgagaattttaaaattatttatactttccacttaa

SEQ ID NO: 60500 - DNA, 50 bp, synthetic construct
  source 1..50: mol_type = other DNA
agtttggacaaaagtgctaccgtctcaacttgttcatcattgtccaaatc

SEQ ID NO: 60501 - DNA, 50 bp, synthetic construct
  source 1..50: mol_type = other DNA
atcgacatcgagtttggacaaaagtgcgggagtcaaaaggtccagtggac

SEQ ID NO: 60502 - DNA, 50 bp, synthetic construct
  source 1..50: mol_type = other DNA
tattttcgcaatacttctttatgctcccataaggaagtaaaaagaatttt

SEQ ID NO: 60503 - DNA, 50 bp, synthetic construct
  source 1..50: mol_type = other DNA
agtggcgttagtgatatccatagacgtctatggatatcgcatagcggcga

SEQ ID NO: 60504 - DNA, 50 bp, synthetic construct
  source 1..50: mol_type = other DNA
tattttagaagggaacgaatgatctaactacaagattctctcttgaaata

SEQ ID NO: 60505 - DNA, 50 bp, synthetic construct
  source 1..50: mol_type = other DNA
tctctagcgatttgaaatcgttagattttaagccttgttcatgcatgagt

SEQ ID NO: 60506 - DNA, 50 bp, synthetic construct
  source 1..50: mol_type = other DNA
ttacttttttacagaaaagactaaaatttaacttttcatgcaaaaattta

SEQ ID NO: 60507 - DNA, 50 bp, synthetic construct
  source 1..50: mol_type = other DNA
tccatttatttttatgattttgataatatgcatattcaaaaattaaggag

SEQ ID NO: 60508 - DNA, 50 bp, synthetic construct
  source 1..50: mol_type = other DNA
gctctagtggcttgtttatttagattataaataaaaagtaacatgttttt

SEQ ID NO: 60509 - DNA, 50 bp, synthetic construct
  source 1..50: mol_type = other DNA
tttagttcctcattttctctcgttggaagaagaagaaacgagataccaaa

SEQ ID NO: 60510 - DNA, 50 bp, synthetic construct
  source 1..50: mol_type = other DNA
gcaatgagaaatgagcttgcttacaggttgaggagggaatttctcatggt

SEQ ID NO: 60511 - DNA, 50 bp, synthetic construct
  source 1..50: mol_type = other DNA
tcaaaaggtaaaataaaggatttaattaccgttttttttgtaaattttct

SEQ ID NO: 60512 - DNA, 50 bp, synthetic construct
  source 1..50: mol_type = other DNA
aaattctggatgcggtgaacttcccgcgttatatgccgaatttagaaagt

SEQ ID NO: 60513 - DNA, 50 bp, synthetic construct
  source 1..50: mol_type = other DNA
atctcaactcggattagggtgccatttgctcaaatagttaaaagtgagat

SEQ ID NO: 60514 - DNA, 50 bp, synthetic construct
  source 1..50: mol_type = other DNA
aatgaacatctgaaccgaatagactgagctattcggcatagtagcataag

SEQ ID NO: 60515 - DNA, 50 bp, synthetic construct
  source 1..50: mol_type = other DNA
agcaatgcccgtaaatactataatgaatcatagtattttgtgcatttttc

SEQ ID NO: 60516 - DNA, 50 bp, synthetic construct
  source 1..50: mol_type = other DNA
gggtgccgccgatggagcctttatacatattggctttgacggcggaacgt

SEQ ID NO: 60517 - DNA, 50 bp, synthetic construct
  source 1..50: mol_type = other DNA
ctttcgaacttttggtggaggcaagggaatactgtcgaaaagtgccccgc

SEQ ID NO: 60518 - DNA, 50 bp, synthetic construct
  source 1..50: mol_type = other DNA
gtgggtgtattcgtttacaacatgagcagcttatgttatattacacccaa

SEQ ID NO: 60519 - DNA, 50 bp, synthetic construct
  source 1..50: mol_type = other DNA
tgcgagcgcacgcgcaaggcactccgcgtggccagatgcgatcgcattca

SEQ ID NO: 60520 - DNA, 50 bp, synthetic construct
  source 1..50: mol_type = other DNA
ataacatattttgagtggttagtttaagctacccgtacccaatagataag

SEQ ID NO: 60521 - DNA, 50 bp, synthetic construct
  source 1..50: mol_type = other DNA
cgccaaaacgcagcgaacaccctacggagggcgtaatgcgcgctgcgatc

SEQ ID NO: 60522 - DNA, 50 bp, synthetic construct
  source 1..50: mol_type = other DNA
ttataattacatttatgttataatatgatagataagcaatgactatataa

SEQ ID NO: 60523 - DNA, 50 bp, synthetic construct
  source 1..50: mol_type = other DNA
attaaatttataatgtcaagaatcttgaagcaggagcttatcaatgaaat

SEQ ID NO: 60524 - DNA, 50 bp, synthetic construct
  source 1..50: mol_type = other DNA
tcttcttccatcggcatggtaaacggaggtaccatgagttacgcatcaga

SEQ ID NO: 60525 - DNA, 50 bp, synthetic construct
  source 1..50: mol_type = other DNA
ctccatctcgtgatccgcagcccatcgtcgccgaggatcgcgagatgcgg

SEQ ID NO: 60526 - DNA, 50 bp, synthetic construct
  source 1..50: mol_type = other DNA
taaattaaggtaatataaggaataatatcaaacgatattacattattttc

SEQ ID NO: 60527 - DNA, 50 bp, synthetic construct
  source 1..50: mol_type = other DNA
ttcggcatgccgtttggggtacatttcagtcagctcaatctgatgttcca

SEQ ID NO: 60528 - DNA, 50 bp, synthetic construct
  source 1..50: mol_type = other DNA
cttggttaagtattgatattgctttaaagcatatacgttacacccacaat

SEQ ID NO: 60529 - DNA, 50 bp, synthetic construct
  source 1..50: mol_type = other DNA
gagggtcatatagaaaaaggttgcgagcaacaatttcatatgtgacactc

SEQ ID NO: 60530 - DNA, 50 bp, synthetic construct
  source 1..50: mol_type = other DNA
cctcaccttcgcctgcggcccccacctggaatgcgcacgcggaggccatg

SEQ ID NO: 60531 - DNA, 50 bp, synthetic construct
  source 1..50: mol_type = other DNA
acggcagtcgcagttgtagtaccagcgcgacatgcagcgggggctgccga

SEQ ID NO: 60532 - DNA, 50 bp, synthetic construct
  source 1..50: mol_type = other DNA
tggaattcttgaaatatgcgatgatatctatgcacttttcaaagatgaaa

SEQ ID NO: 60533 - DNA, 50 bp, synthetic construct
  source 1..50: mol_type = other DNA
caaatactataatgattctaagacttcttttagtagaaagatagtatttt

SEQ ID NO: 60534 - DNA, 50 bp, synthetic construct
  source 1..50: mol_type = other DNA
aaaaccatgaaaaaatatattggaattcaaacctattctttcagaattaa

SEQ ID NO: 60535 - DNA, 50 bp, synthetic construct
  source 1..50: mol_type = other DNA
gtcgggtcttttgattttacttaatattaaggatgagacttatctatttg

SEQ ID NO: 60536 - DNA, 50 bp, synthetic construct
  source 1..50: mol_type = other DNA
gggtgtaatagttgacataaggctgctcctatgtgtgtcacattacaccc

SEQ ID NO: 60537 - DNA, 50 bp, synthetic construct
  source 1..50: mol_type = other DNA
tatttagacacatcgccatttgataaatcaaattactatctaagtaaatt

SEQ ID NO: 60538 - DNA, 50 bp, synthetic construct
  source 1..50: mol_type = other DNA
caggatgactccggcggagcttatcaaggtgcggcagcggactgtaactc

SEQ ID NO: 60539 - DNA, 50 bp, synthetic construct
  source 1..50: mol_type = other DNA
aaatccctatgaaatcctaactttttcatatgtgtattatataccatttc

SEQ ID NO: 60540 - DNA, 50 bp, synthetic construct
  source 1..50: mol_type = other DNA
tagatgcactatccactatggatcgcgctcgagcatgctgttgcgctctt

SEQ ID NO: 60541 - DNA, 50 bp, synthetic construct
  source 1..50: mol_type = other DNA
caaaggcggtgcgttgagtgatcgcgcggggcctcaacggggcggagtag

SEQ ID NO: 60542 - DNA, 50 bp, synthetic construct
  source 1..50: mol_type = other DNA
accttcgcattacgaatgcgctgctcgttcaggatagataattttattgt

SEQ ID NO: 60543 - DNA, 50 bp, synthetic construct
  source 1..50: mol_type = other DNA
attaaagattaaagaatttcacggcagaagagatcttaacaatttctaac

SEQ ID NO: 60544 - DNA, 50 bp, synthetic construct
  source 1..50: mol_type = other DNA
cgtaaagcattacccgacttaagcacgcttaaccaatataaagcaggtaa

SEQ ID NO: 60545 - DNA, 50 bp, synthetic construct
  source 1..50: mol_type = other DNA
aagatgaacttataaacgttatggcttcatacaattaccaggaacgcggc

SEQ ID NO: 60546 - DNA, 50 bp, synthetic construct
  source 1..50: mol_type = other DNA
tggtacacctacccgctttggtaacaataccaattcctaagcgtccacct

SEQ ID NO: 60547 - DNA, 50 bp, synthetic construct
  source 1..50: mol_type = other DNA
ttgtatcgctttagatggtgtatttaaatgcactacatgggcacctaaac

SEQ ID NO: 60548 - DNA, 50 bp, synthetic construct
  source 1..50: mol_type = other DNA
gattatcatttaaagatgaacttataacagagaattaacaaacactaaga

SEQ ID NO: 60549 - DNA, 50 bp, synthetic construct
  source 1..50: mol_type = other DNA
ttttgtcttaatgatactgttactcagataacagtatcatttaaacaaac

SEQ ID NO: 60550 - DNA, 50 bp, synthetic construct
  source 1..50: mol_type = other DNA
tacgatagttaatcctacagccagatcttataccctgattagctgccgtg

SEQ ID NO: 60551 - DNA, 50 bp, synthetic construct
  source 1..50: mol_type = other DNA
aaagcgccagtcattccagtcactcgttatacgtcgatttaggccgctta

SEQ ID NO: 60552 - DNA, 50 bp, synthetic construct
  source 1..50: mol_type = other DNA
accaaactttcaaagctaaacgatttttttacaaaatttgaaagagggta

SEQ ID NO: 60553 - DNA, 50 bp, synthetic construct
  source 1..50: mol_type = other DNA
aatggtgtcttctgtcctaccttcttattcgaaaggtagaatgcaccaat

SEQ ID NO: 60554 - DNA, 50 bp, synthetic construct
  source 1..50: mol_type = other DNA
cctcactcttaagagatacggtttttcatgttgtactctagtctataggt

SEQ ID NO: 60555 - DNA, 50 bp, synthetic construct
  source 1..50: mol_type = other DNA
agggtagattctcaacttgcgagcaaggtcataagttgttaaactaccct

SEQ ID NO: 60556 - DNA, 50 bp, synthetic construct
  source 1..50: mol_type = other DNA
taagacgttcaacaaaatgaaaatgcacaacattttttttgtacgtattc

SEQ ID NO: 60557 - DNA, 50 bp, synthetic construct
  source 1..50: mol_type = other DNA
cagttcctggacccgtcggcgccgctcggctacggtctggacacgacttg

SEQ ID NO: 60558 - DNA, 50 bp, synthetic construct
  source 1..50: mol_type = other DNA
ctaccaactgagctaaggccccgcaggccgggccgcacctgtgtcgctcg

SEQ ID NO: 60559 - DNA, 50 bp, synthetic construct
  source 1..50: mol_type = other DNA
cttatctattgggtacgggtagcttaaactaaccactcaaaatatgttat

SEQ ID NO: 60560 - DNA, 50 bp, synthetic construct
  source 1..50: mol_type = other DNA
aaattgacaagtgtctctttgatcttcatcaaggtaactcttgtcagttt

SEQ ID NO: 60561 - DNA, 50 bp, synthetic construct
  source 1..50: mol_type = other DNA
cgcaatgcaactatttgcgcagtgatgaatgcgctataggttgcaatgct

SEQ ID NO: 60562 - DNA, 50 bp, synthetic construct
  source 1..50: mol_type = other DNA
ggtaggtaattgttgcagcatttcttgatgttctgcaacaaaacactact

SEQ ID NO: 60563 - DNA, 50 bp, synthetic construct
  source 1..50: mol_type = other DNA
gtcgagagatagcgctctgcgaaggagtgttggcctagctatacgcccgc

SEQ ID NO: 60564 - DNA, 50 bp, synthetic construct
  source 1..50: mol_type = other DNA
agaggaggtgtagtatgaatcggtcaacggccgggattggcaccatctcc

SEQ ID NO: 60565 - DNA, 50 bp, synthetic construct
  source 1..50: mol_type = other DNA
ggttgctgaattgcccacaatcatagcccactataggcaatttgacaacc

SEQ ID NO: 60566 - DNA, 50 bp, synthetic construct
  source 1..50: mol_type = other DNA
aagacgcccgaaaaattacaggttaatacccgtaagatcggaccttacgg

SEQ ID NO: 60567 - DNA, 50 bp, synthetic construct
  source 1..50: mol_type = other DNA
tttcttctccatttctatagatcgcttgattaatatccagtcctaatttt

SEQ ID NO: 60568 - DNA, 50 bp, synthetic construct
  source 1..50: mol_type = other DNA
tttatagtattaaatattattaaaaatgatgcgatttttaattatataat

SEQ ID NO: 60569 - DNA, 50 bp, synthetic construct
  source 1..50: mol_type = other DNA
ttttttacgaaaatctattgaatatgatagtccaaacttaaattaaaaaa

SEQ ID NO: 60570 - DNA, 50 bp, synthetic construct
  source 1..50: mol_type = other DNA
atctatgcggatgagggtatctcagctgagatattactatcatttgggag

SEQ ID NO: 60571 - DNA, 50 bp, synthetic construct
  source 1..50: mol_type = other DNA
tataataggcacaacagaaatgaagtttttgttccattgggcattctata

SEQ ID NO: 60572 - DNA, 50 bp, synthetic construct
  source 1..50: mol_type = other DNA
gtaaaatgattattacagaatttaattaactagagtaatagcctagttac

SEQ ID NO: 60573 - DNA, 50 bp, synthetic construct
  source 1..50: mol_type = other DNA
taattcgacatgataaatttatgccaacattgtactataatgcttttcta

SEQ ID NO: 60574 - DNA, 50 bp, synthetic construct
  source 1..50: mol_type = other DNA
gaaattattaaaattagagtgtttaaaaaggctgtaaccacaatggtttc

SEQ ID NO: 60575 - DNA, 50 bp, synthetic construct
  source 1..50: mol_type = other DNA
tactaaaatcaatcacaataatatttggttttcataacttgatagctgtt

SEQ ID NO: 60576 - DNA, 50 bp, synthetic construct
  source 1..50: mol_type = other DNA
ttatcggaaaattaatcaacaattttactttagtggaaatcaaggatagt

SEQ ID NO: 60577 - DNA, 50 bp, synthetic construct
  source 1..50: mol_type = other DNA
tataaatatcattcactcatgataccataccacaaataatgatattttaa

SEQ ID NO: 60578 - DNA, 50 bp, synthetic construct
  source 1..50: mol_type = other DNA
aaaaaatatcattatttgtggtacggtatcatgagtgaatgatatcttta

SEQ ID NO: 60579 - DNA, 50 bp, synthetic construct
  source 1..50: mol_type = other DNA
ggtttggacaatgatgaacaagttgagacggtagcacttttgtccaaact

SEQ ID NO: 60580 - DNA, 50 bp, synthetic construct
  source 1..50: mol_type = other DNA
ttttccaattagtttcaagacttcttgagacaatgaaacggataacaaag

SEQ ID NO: 60581 - DNA, 50 bp, synthetic construct
  source 1..50: mol_type = other DNA
aattttgttttgaaatttttgcccagcaacaaaatttacaatgccaaaag

SEQ ID NO: 60582 - DNA, 50 bp, synthetic construct
  source 1..50: mol_type = other DNA
gcattgtgaataaaacttagagattaacctctaaaatcctctcagaaagc

SEQ ID NO: 60583 - DNA, 50 bp, synthetic construct
  source 1..50: mol_type = other DNA
tttatagatgaattgatatataagccaatgattatcaatacattcttaat

SEQ ID NO: 60584 - DNA, 50 bp, synthetic construct
  source 1..50: mol_type = other DNA
tcagaactgtctggaaatcatccgatcgggtgatctccagaccaaggaga

SEQ ID NO: 60585 - DNA, 50 bp, synthetic construct
  source 1..50: mol_type = other DNA
tatgaaggtatggcagaaaaatattaatagcaaaggatttactcttctct

SEQ ID NO: 60586 - DNA, 50 bp, synthetic construct
  source 1..50: mol_type = other DNA
aaaacaccgccatcgtatagggcagaatatccctcgtatggtggatattc

SEQ ID NO: 60587 - DNA, 50 bp, synthetic construct
  source 1..50: mol_type = other DNA
aaatgcacctgcagttgcagcaaaattttccacatcctgacggtcctaaa

SEQ ID NO: 60588 - DNA, 50 bp, synthetic construct
  source 1..50: mol_type = other DNA
ttaatataagtattgtgataattagttatcattcctaatacatatattaa

SEQ ID NO: 60589 - DNA, 50 bp, synthetic construct
  source 1..50: mol_type = other DNA
tctatttaaatggtatatctttttcggataaaatcgaccctttcaatgac

SEQ ID NO: 60590 - DNA, 50 bp, synthetic construct
  source 1..50: mol_type = other DNA
ggtacattagtttcacctacctgcttagaggtataagaaattaagttgac

SEQ ID NO: 60591 - DNA, 50 bp, synthetic construct
  source 1..50: mol_type = other DNA
aagtgcagtttgaagtaaatgctttaatacaacaagttaaaactgacgga

SEQ ID NO: 60592 - DNA, 50 bp, synthetic construct
  source 1..50: mol_type = other DNA
ttttaacaaatactggtaattattgaaataattataaataatatgaaaaa

SEQ ID NO: 60593 - DNA, 50 bp, synthetic construct
  source 1..50: mol_type = other DNA
gtacataaacagcatatgccacaattataaggcactcgttgtttttatac

SEQ ID NO: 60594 - DNA, 50 bp, synthetic construct
  source 1..50: mol_type = other DNA
tttttgttcttaatttttattttgatataaatccaatcttagacattttt

SEQ ID NO: 60595 - DNA, 50 bp, synthetic construct
  source 1..50: mol_type = other DNA
gtagttttttatattgctggcaaaattttagaaggaagataagaccccaa

SEQ ID NO: 60596 - DNA, 50 bp, synthetic construct
  source 1..50: mol_type = other DNA
atctgggttcgagatcggacttcaagaagtgggcgatctcgaacggcaac

SEQ ID NO: 60597 - DNA, 50 bp, synthetic construct
  source 1..50: mol_type = other DNA
ctaaaaaaacgttcaaaaacactatagtatcttttgagaggttttcttgt

SEQ ID NO: 60598 - DNA, 50 bp, synthetic construct
  source 1..50: mol_type = other DNA
tcaattggaaaatataaataattttaaaattattgattttttccatctca

SEQ ID NO: 60599 - DNA, 50 bp, synthetic construct
  source 1..50: mol_type = other DNA
agaacaggttaaagcttataaagaatggaggtaaatttttaaaatgaaaa

SEQ ID NO: 60600 - DNA, 50 bp, synthetic construct
  source 1..50: mol_type = other DNA
gaaaataccgaaaaatatcgaaaaattttatcattttttaggaaattttg

SEQ ID NO: 60601 - DNA, 50 bp, synthetic construct
  source 1..50: mol_type = other DNA
atcaaagagccataaggtcaaggctttttctgacctaaattctccaattt

SEQ ID NO: 60602 - DNA, 50 bp, synthetic construct
  source 1..50: mol_type = other DNA
taataaaagaaggttccattgaaggaattagggaatgttgactgagatgc

SEQ ID NO: 60603 - DNA, 50 bp, synthetic construct
  source 1..50: mol_type = other DNA
gtgttataaagtgtcacttctttactttgaaaagtccgttgttattgcgt

SEQ ID NO: 60604 - DNA, 50 bp, synthetic construct
  source 1..50: mol_type = other DNA
taagtatataaaccatcataatagattaccagtatttgttaaaatcattt

SEQ ID NO: 60605 - DNA, 50 bp, synthetic construct
  source 1..50: mol_type = other DNA
tcaaaagttgaaggcggagatatttaaatttctttatatcttccacttga

SEQ ID NO: 60606 - DNA, 50 bp, synthetic construct
  source 1..50: mol_type = other DNA
atatattttgagcagcttttcaaatatgtaaaattacagaactaattcct

SEQ ID NO: 60607 - DNA, 50 bp, synthetic construct
  source 1..50: mol_type = other DNA
ttgaccacttaggacagttcaactgatgttggacagtccgaagtggtacg

SEQ ID NO: 60608 - DNA, 50 bp, synthetic construct
  source 1..50: mol_type = other DNA
cgcaactttaaccacgcacagcactcgtatgctggttgtagaaaaaacac

SEQ ID NO: 60609 - DNA, 50 bp, synthetic construct
  source 1..50: mol_type = other DNA
ttacttaacctccttgatttttgaattcagatataaaacttactaaaact

SEQ ID NO: 60610 - DNA, 50 bp, synthetic construct
  source 1..50: mol_type = other DNA
tcttaacaatagcatttactagatatccaaaggggattgtattgttcatg

SEQ ID NO: 60611 - DNA, 50 bp, synthetic construct
  source 1..50: mol_type = other DNA
agtgtagagggtgtacggttgtactgatacaactatacaccctatacaca

SEQ ID NO: 60612 - DNA, 50 bp, synthetic construct
  source 1..50: mol_type = other DNA
gataaaaagctacaaccgtgtcaaaaaagctaaggttaaagcttttacat

SEQ ID NO: 60613 - DNA, 50 bp, synthetic construct
  source 1..50: mol_type = other DNA
ttaaacatgaaattaaaaggatattaatcaccgagtaacaaaagaatttc

SEQ ID NO: 60614 - DNA, 50 bp, synthetic construct
  source 1..50: mol_type = other DNA
aatcattataacatgtttgatgtttgtacattaaatcatcaataatgacc

SEQ ID NO: 60615 - DNA, 50 bp, synthetic construct
  source 1..50: mol_type = other DNA
tgtcgtcaccttgttggtgtaattaggttgacgccaacagggtgacgaca

SEQ ID NO: 60616 - DNA, 50 bp, synthetic construct
  source 1..50: mol_type = other DNA
gcctgccaatgagatcgtaattcccaagacatagtatatcatctttccgg

SEQ ID NO: 60617 - DNA, 50 bp, synthetic construct
  source 1..50: mol_type = other DNA
ctttactagttagtaaagaggggagaaccgtatcacaaatgatagtaaag

SEQ ID NO: 60618 - DNA, 50 bp, synthetic construct
  source 1..50: mol_type = other DNA
agcagttactttatttgtaatcactagtgtttgcaaataaaccaagtact

SEQ ID NO: 60619 - DNA, 50 bp, synthetic construct
  source 1..50: mol_type = other DNA
ccgtttcacgtttcccctccctaataataaggaggccaaattatgaaaac

SEQ ID NO: 60620 - DNA, 50 bp, synthetic construct
  source 1..50: mol_type = other DNA
tgcaaccggcaaaataattgcgtctacaaccaataatctaaccacttatt

SEQ ID NO: 60621 - DNA, 50 bp, synthetic construct
  source 1..50: mol_type = other DNA
ttttaaaaagagagaaggttattttcaaataattcccatcattcataaaa

SEQ ID NO: 60622 - DNA, 50 bp, synthetic construct
  source 1..50: mol_type = other DNA
gaaaagatactgtttcccgcggaaaagcccacgggcttttctttttatcg

SEQ ID NO: 60623 - DNA, 50 bp, synthetic construct
  source 1..50: mol_type = other DNA
agtaaggtgtaccaatacctgaatatattcatttattaccttttcttctt

SEQ ID NO: 60624 - DNA, 50 bp, synthetic construct
  source 1..50: mol_type = other DNA
agcgcttttttctattccaaaaccaaggtgattattttgactaaagcagc

SEQ ID NO: 60625 - DNA, 50 bp, synthetic construct
  source 1..50: mol_type = other DNA
ttgtgtatttcaaaccacatctcgaatgtgatgtgatttgaaatttataa

SEQ ID NO: 60626 - DNA, 50 bp, synthetic construct
  source 1..50: mol_type = other DNA
aatcttaccttgttttgtgtttacatgtgtactcgaaacaaggttaaatg

SEQ ID NO: 60627 - DNA, 50 bp, synthetic construct
  source 1..50: mol_type = other DNA
gaaggccaaaactatcacaattgtactcaattggatggaatttgctcttc

SEQ ID NO: 60628 - DNA, 50 bp, synthetic construct
  source 1..50: mol_type = other DNA
aaattaaatatttgagtttaaaattatttttaatttcaaatgtttcttta

SEQ ID NO: 60629 - DNA, 50 bp, synthetic construct
  source 1..50: mol_type = other DNA
ataaatccctatctgaccgctccaaacgaagcgttcacttagggattgaa

SEQ ID NO: 60630 - DNA, 50 bp, synthetic construct
  source 1..50: mol_type = other DNA
tggtttaccacctcgactactgccgtctcagtagttcaactggtaccatc

SEQ ID NO: 60631 - DNA, 50 bp, synthetic construct
  source 1..50: mol_type = other DNA
aatgttattgattttaggtaatttaagaaaagccaccaatcaaggaagta

SEQ ID NO: 60632 - DNA, 50 bp, synthetic construct
  source 1..50: mol_type = other DNA
aaatagaagaagaacatttgaagggtatacacaaaacggttccactatgt

SEQ ID NO: 60633 - DNA, 50 bp, synthetic construct
  source 1..50: mol_type = other DNA
atagtaaaccaccttccatttttagtctagaatgggcggaatttgactag

SEQ ID NO: 60634 - DNA, 50 bp, synthetic construct
  source 1..50: mol_type = other DNA
gcgattattcagtccgctatattttactattagtcaaaactgataatata

SEQ ID NO: 60635 - DNA, 50 bp, synthetic construct
  source 1..50: mol_type = other DNA
aagcgtagttgatttaatactttctggaaaagtatagaaaaaagtcgaaa

SEQ ID NO: 60636 - DNA, 50 bp, synthetic construct
  source 1..50: mol_type = other DNA
tcaattccttctcccggataagttataatcaaaccaaaaggaggaaaatg

SEQ ID NO: 60637 - DNA, 50 bp, synthetic construct
  source 1..50: mol_type = other DNA
aatggaagtactgaaacttcgctctagggcgaaatttttggattgaaatc

SEQ ID NO: 60638 - DNA, 50 bp, synthetic construct
  source 1..50: mol_type = other DNA
tttttacaacatttatctgtatttgaaatctcagagtaatgttgtaaaac

SEQ ID NO: 60639 - DNA, 50 bp, synthetic construct
  source 1..50: mol_type = other DNA
ttaataaaaatgacgaaaaaataaattttttatataatcatttaacatct

SEQ ID NO: 60640 - DNA, 50 bp, synthetic construct
  source 1..50: mol_type = other DNA
ctaaatattatattatatatttagattttaataatatagatgatatagaa

SEQ ID NO: 60641 - DNA, 50 bp, synthetic construct
  source 1..50: mol_type = other DNA
caagttactattgaatggctctagtaaacttctactataataataacttg

SEQ ID NO: 60642 - DNA, 50 bp, synthetic construct
  source 1..50: mol_type = other DNA
taaacacttaattggtgttacccataaatgctgaatcaattaatataatc

SEQ ID NO: 60643 - DNA, 50 bp, synthetic construct
  source 1..50: mol_type = other DNA
gactatgaaaaatctaagtttatcgatatatagtgtgccattacatagga

SEQ ID NO: 60644 - DNA, 50 bp, synthetic construct
  source 1..50: mol_type = other DNA
ctaagcgagaacattgatttgcttgaaagaaaatcaatgtagccgcttat

SEQ ID NO: 60645 - DNA, 50 bp, synthetic construct
  source 1..50: mol_type = other DNA
aaattctggatgcggtgaattttccgcgttatatgccgaatttagaaagt

SEQ ID NO: 60646 - DNA, 50 bp, synthetic construct
  source 1..50: mol_type = other DNA
atgctatgggctgtgttaggctaggagtgatatatagtgtgccattacat

SEQ ID NO: 60647 - DNA, 50 bp, synthetic construct
  source 1..50: mol_type = other DNA
tgttggattcttttttcattataatattccggccaagaaagtgcagacca

SEQ ID NO: 60648 - DNA, 50 bp, synthetic construct
  source 1..50: mol_type = other DNA
aaaatttcctaaaaaatgataaaatgctttatctttttttcataggttgc

SEQ ID NO: 60649 - DNA, 50 bp, synthetic construct
  source 1..50: mol_type = other DNA
tcatgtgtagaaaaccattttgggaatccaagagtcatttctacacatta

SEQ ID NO: 60650 - DNA, 50 bp, synthetic construct
  source 1..50: mol_type = other DNA
gaggtcctcccaggggttgtggaccagcccccgacccagggaagtcccag

SEQ ID NO: 60651 - DNA, 50 bp, synthetic construct
  source 1..50: mol_type = other DNA
ttttgccctatttttttccacgttttgtcggggaatttaatatggcaatt

SEQ ID NO: 60652 - DNA, 50 bp, synthetic construct
  source 1..50: mol_type = other DNA
ggttcggccgcaacgaaggggtcatgagcggcgacgagttcggcgtcacc

SEQ ID NO: 60653 - DNA, 50 bp, synthetic construct
  source 1..50: mol_type = other DNA
tagctcgtcttggtgtcaaggtatatatgctatttcgtaatacggaggca

SEQ ID NO: 60654 - DNA, 50 bp, synthetic construct
  source 1..50: mol_type = other DNA
ttgaattactcagatgtaagaataattataattccacaatcgacattcat

SEQ ID NO: 60655 - DNA, 50 bp, synthetic construct
  source 1..50: mol_type = other DNA
cttcgaacgttggtttcgaaggttacaacctatgtagaggaacgacgagg

SEQ ID NO: 60656 - DNA, 50 bp, synthetic construct
  source 1..50: mol_type = other DNA
taagctgccgtccatggaacccccgcgttaattccctgtcgagcaaacaa

SEQ ID NO: 60657 - DNA, 50 bp, synthetic construct
  source 1..50: mol_type = other DNA
ttttattagatcgataattttctttaaaggaggagttatcagtgtttaat

SEQ ID NO: 60658 - DNA, 50 bp, synthetic construct
  source 1..50: mol_type = other DNA
ataagcgtccttccttatacaatgtttcaactcttttgaacgaacattat

SEQ ID NO: 60659 - DNA, 50 bp, synthetic construct
  source 1..50: mol_type = other DNA
tatgtattgtaacatgctgttaagatgttaactacaggaaaacacaatta

SEQ ID NO: 60660 - DNA, 50 bp, synthetic construct
  source 1..50: mol_type = other DNA
aaacggcgggaatcggcgttcccggtgtggcgggccgaagccgacgaaac

SEQ ID NO: 60661 - DNA, 50 bp, synthetic construct
  source 1..50: mol_type = other DNA
cgccttcaggcgctcgcggctgtaggctcggccgcgctcgactggctgcg

SEQ ID NO: 60662 - DNA, 50 bp, synthetic construct
  source 1..50: mol_type = other DNA
acggtgtatcttgcattggcgcccagagagcgcaatgagagcctgcctgt

SEQ ID NO: 60663 - DNA, 50 bp, synthetic construct
  source 1..50: mol_type = other DNA
atttaatttttattttagggtttatttaaccccacttcttaaatcttagg

SEQ ID NO: 60664 - DNA, 50 bp, synthetic construct
  source 1..50: mol_type = other DNA
aacgaggttacagtttcgtcccgcttaatgagcgatgttgtaaccccgga

SEQ ID NO: 60665 - DNA, 50 bp, synthetic construct
  source 1..50: mol_type = other DNA
gtccagtatatattgcactctcccaaggggacgtgcagatatatactgga

SEQ ID NO: 60666 - DNA, 50 bp, synthetic construct
  source 1..50: mol_type = other DNA
cgcaggcccgggcgtctcggtcatcggcggtggagatgccctggaagccg

SEQ ID NO: 60667 - DNA, 50 bp, synthetic construct
  source 1..50: mol_type = other DNA
gagtgttacataagaaattgctgggagcaagcttttcgtaagtaacactg

SEQ ID NO: 60668 - DNA, 50 bp, synthetic construct
  source 1..50: mol_type = other DNA
accggggcggcttttttattttagcctccaattccatcagccgccccttt

SEQ ID NO: 60669 - DNA, 50 bp, synthetic construct
  source 1..50: mol_type = other DNA
tccttatcaccgtaaaactaggttttaacccggttttaggtgggttttta

SEQ ID NO: 60670 - DNA, 50 bp, synthetic construct
  source 1..50: mol_type = other DNA
ggtggttttcagcagagaaagcacatattccccgccgcatgaaaaagaag

SEQ ID NO: 60671 - DNA, 50 bp, synthetic construct
  source 1..50: mol_type = other DNA
gcccgactgatcgaacataacctgcggctcatctgtctttgctgggggaa

SEQ ID NO: 60672 - DNA, 50 bp, synthetic construct
  source 1..50: mol_type = other DNA
taccttgggtgcgagcttgcgcccatgggcctgggcccctggcctgacgt

SEQ ID NO: 60673 - DNA, 50 bp, synthetic construct
  source 1..50: mol_type = other DNA
agcgggcgtagattgcggcgcgcctgcgtttgcaggcgcttggccccgac

SEQ ID NO: 60674 - DNA, 50 bp, synthetic construct
  source 1..50: mol_type = other DNA
atatcagctcacaaaagacgccagcataggcgttctcaagttctttatat

SEQ ID NO: 60675 - DNA, 50 bp, synthetic construct
  source 1..50: mol_type = other DNA
tactttttttatatataacaattatataatagtataagtactcttcccct

SEQ ID NO: 60676 - DNA, 50 bp, synthetic construct
  source 1..50: mol_type = other DNA
ttttcacctcctttgggcatgtgacatctaatgcccagagtatcttaatt

SEQ ID NO: 60677 - DNA, 50 bp, synthetic construct
  source 1..50: mol_type = other DNA
gacgcgcggcttcgcgcgcaagggcggtcatgtcggagctggcccgcgtc

SEQ ID NO: 60678 - DNA, 50 bp, synthetic construct
  source 1..50: mol_type = other DNA
cctgattttaggcactttctgacctctgcaaaaaagcatacagagccaaa

SEQ ID NO: 60679 - DNA, 50 bp, synthetic construct
  source 1..50: mol_type = other DNA
tggcgggcatgccagcctgccgcagttgctttcccggagcatgcagaccg

SEQ ID NO: 60680 - DNA, 50 bp, synthetic construct
  source 1..50: mol_type = other DNA
tgagatggaaaaaatcaataattttaaaattatttatattttccacttga

SEQ ID NO: 60681 - DNA, 50 bp, synthetic construct
  source 1..50: mol_type = other DNA
atgttgtaataagtgtcacacactcaagtgtgttatgcttatacaaacaa

SEQ ID NO: 60682 - DNA, 50 bp, synthetic construct
  source 1..50: mol_type = other DNA
ttcattaggtgttcttttattaacatgtcatgtactcttcgtataattaa

SEQ ID NO: 60683 - DNA, 50 bp, synthetic construct
  source 1..50: mol_type = other DNA
cattctcgcaagctgctgtgattcttgaagtttagtggcttgcgttcgtg

SEQ ID NO: 60684 - DNA, 50 bp, synthetic construct
  source 1..50: mol_type = other DNA
cattaacaatttgatctacagctaattggttgtttgtcatgttgtgaagg

SEQ ID NO: 60685 - DNA, 50 bp, synthetic construct
  source 1..50: mol_type = other DNA
gatggctttttcagccagttctccatggaaccatggatgtacatatgaga

SEQ ID NO: 60686 - DNA, 50 bp, synthetic construct
  source 1..50: mol_type = other DNA
agcgattgtttgcttctgacgcggatccgggtcatgagcaaggtgaaact

SEQ ID NO: 60687 - DNA, 50 bp, synthetic construct
  source 1..50: mol_type = other DNA
gcaagtcctgaggaggttccatgcgcggatgtcgaacactccgcacccgt

SEQ ID NO: 60688 - DNA, 50 bp, synthetic construct
  source 1..50: mol_type = other DNA
ttcttttcgagtgcgaatagtgacacgttactattcgcaataaaaaagac

SEQ ID NO: 60689 - DNA, 50 bp, synthetic construct
  source 1..50: mol_type = other DNA
agcatatagaaaacttgataaagttaaaagtgtaaagttttctctatctt

SEQ ID NO: 60690 - DNA, 50 bp, synthetic construct
  source 1..50: mol_type = other DNA
accgcgaacgtgtacgggggcgacgcgtcccagcggtacatccgcgccga

SEQ ID NO: 60691 - DNA, 50 bp, synthetic construct
  source 1..50: mol_type = other DNA
cattacgccacctcgggcgcatcgtctgaaaaaactggaatggctgaaaa

SEQ ID NO: 60692 - DNA, 50 bp, synthetic construct
  source 1..50: mol_type = other DNA
cgcatggtcttgattttcttgccgcgatcaggtaaaatcgaagccattag

SEQ ID NO: 60693 - DNA, 50 bp, synthetic construct
  source 1..50: mol_type = other DNA
atccctcgggtgcccgaaggccctcgagctacatcgagcagtcgaagaac

SEQ ID NO: 60694 - DNA, 50 bp, synthetic construct
  source 1..50: mol_type = other DNA
aaaaattgtctaaaaaattcagaaaatactgaattgtataattaatgttt

SEQ ID NO: 60695 - DNA, 50 bp, synthetic construct
  source 1..50: mol_type = other DNA
caaaagttaaaaattgtctaaaaaattttatagataattagaaatcaaaa

SEQ ID NO: 60696 - DNA, 50 bp, synthetic construct
  source 1..50: mol_type = other DNA
ttgtatcaacgctatgcactccacatgtgttgtccataggataggaacac

SEQ ID NO: 60697 - DNA, 50 bp, synthetic construct
  source 1..50: mol_type = other DNA
tgaaaaaaccgcatcacttatgatatgatgcggtttatttttagtttttt

SEQ ID NO: 60698 - DNA, 50 bp, synthetic construct
  source 1..50: mol_type = other DNA
gttttcattataaaaccacctttcaaagaagaatataaacaaatcaaacc

SEQ ID NO: 60699 - DNA, 50 bp, synthetic construct
  source 1..50: mol_type = other DNA
tattataaaagagatttcttcctatttattttaaattttccaatttatat

SEQ ID NO: 60700 - DNA, 50 bp, synthetic construct
  source 1..50: mol_type = other DNA
tcgtgtcattgatcaagatggcacatatatagttgcgaaaggagatgtat

SEQ ID NO: 60701 - DNA, 50 bp, synthetic construct
  source 1..50: mol_type = other DNA
ctaaattatatattaatgaagaagaaattcatcttatgtataccatttta

SEQ ID NO: 60702 - DNA, 50 bp, synthetic construct
  source 1..50: mol_type = other DNA
ctctagtagcttgtttatttagattatttagttcaataactctagcttgt

SEQ ID NO: 60703 - DNA, 50 bp, synthetic construct
  source 1..50: mol_type = other DNA
caagttactattgaatggctctagtacgttggaagatttgaaggaacttg

SEQ ID NO: 60704 - DNA, 50 bp, synthetic construct
  source 1..50: mol_type = other DNA
attgacgtcaacaaactaagtgatcttgtacttgttttgaccgtaactca

SEQ ID NO: 60705 - DNA, 50 bp, synthetic construct
  source 1..50: mol_type = other DNA
taacttttttacagaaaagactaaaatttaacttttcatgcaaaaattta

SEQ ID NO: 60706 - DNA, 50 bp, synthetic construct
  source 1..50: mol_type = other DNA
ttttcggaaagaattcgagaaattacccaaaaaagaacgtatgtgcgaaa

SEQ ID NO: 60707 - DNA, 50 bp, synthetic construct
  source 1..50: mol_type = other DNA
attgttacaaaaaatttgcattcataataatataagttgagaataatata

SEQ ID NO: 60708 - DNA, 50 bp, synthetic construct
  source 1..50: mol_type = other DNA
ttataggggactatataaagaaagtaaactgttaatataatcatatataa

SEQ ID NO: 60709 - DNA, 50 bp, synthetic construct
  source 1..50: mol_type = other DNA
ctaacaaagttcaaaatatagttgtacaacaaaaagtcacaaaaatttaa

SEQ ID NO: 60710 - DNA, 50 bp, synthetic construct
  source 1..50: mol_type = other DNA
aaaaggaaaatttacagaggatgaacgtatctatatgaagtgctgctttt

SEQ ID NO: 60711 - DNA, 50 bp, synthetic construct
  source 1..50: mol_type = other DNA
atggaattagctctctttatacgatatcgctttgccatttttaatccgat

SEQ ID NO: 60712 - DNA, 50 bp, synthetic construct
  source 1..50: mol_type = other DNA
gaggctccatacgtgccacctcaaatttcccgtagttcggaaaatccctc

SEQ ID NO: 60713 - DNA, 50 bp, synthetic construct
  source 1..50: mol_type = other DNA
gcacaggctctcattcagacagaatagtctgtaaatatctgttccacaat

SEQ ID NO: 60714 - DNA, 50 bp, synthetic construct
  source 1..50: mol_type = other DNA
cagtaaccataagtagagctacatatagccctttttactgatgccgaaga

SEQ ID NO: 60715 - DNA, 50 bp, synthetic construct
  source 1..50: mol_type = other DNA
ggctctgagcttattcatcgtctgcggagagtatgaacaagcctgtagca

SEQ ID NO: 60716 - DNA, 50 bp, synthetic construct
  source 1..50: mol_type = other DNA
gagttttttaagcggcatttttttcaaatgaatagccgtccggtgcctat

SEQ ID NO: 60717 - DNA, 50 bp, synthetic construct
  source 1..50: mol_type = other DNA
ctttcggtagtgtctatatatcactcgtgatattaaaacagccctcacga

SEQ ID NO: 60718 - DNA, 50 bp, synthetic construct
  source 1..50: mol_type = other DNA
taaagatatcatttctttatgataccataccacaaataatgatatttttt

SEQ ID NO: 60719 - DNA, 50 bp, synthetic construct
  source 1..50: mol_type = other DNA
attaggtcttgtgaagataccatcagcatggtattttcaaaagacctctt

SEQ ID NO: 60720 - DNA, 50 bp, synthetic construct
  source 1..50: mol_type = other DNA
accatgcccgcgatcatcggcggaggtccgcggtgtgctgcccgcggtgc

SEQ ID NO: 60721 - DNA, 50 bp, synthetic construct
  source 1..50: mol_type = other DNA
ctctctggatgccaagactgctccatgaaaaagtgtgctgatttccgaag

SEQ ID NO: 60722 - DNA, 50 bp, synthetic construct
  source 1..50: mol_type = other DNA
atttctgtccatgtgatagatatttgaaaaactgattaataaatttgaag

SEQ ID NO: 60723 - DNA, 50 bp, synthetic construct
  source 1..50: mol_type = other DNA
cacgcttgatgtccccagaccggacgataggcgaccggaaatttgacgac

SEQ ID NO: 60724 - DNA, 50 bp, synthetic construct
  source 1..50: mol_type = other DNA
cgcccgcgccgcgtcgacgttcttcgcgggacaccgacgcttgcactgcg

SEQ ID NO: 60725 - DNA, 50 bp, synthetic construct
  source 1..50: mol_type = other DNA
aggcggaccagccgccgccacgccgcggcgtggccacgcgttcgccgctc

SEQ ID NO: 60726 - DNA, 50 bp, synthetic construct
  source 1..50: mol_type = other DNA
tgattacataaagcggagaaagttgaaactttctcaccgttattagcaca

SEQ ID NO: 60727 - DNA, 50 bp, synthetic construct
  source 1..50: mol_type = other DNA
taaaagcatagaaattctgaaagataaatagtaaaatctgtacactttta

SEQ ID NO: 60728 - DNA, 50 bp, synthetic construct
  source 1..50: mol_type = other DNA
aaccaaaatcgggcggtatttattgcaggatttacatcgccgtacttttt

SEQ ID NO: 60729 - DNA, 50 bp, synthetic construct
  source 1..50: mol_type = other DNA
attatagaacacaccttactttaaattaatagtatttttttgtaaataaa

SEQ ID NO: 60730 - DNA, 50 bp, synthetic construct
  source 1..50: mol_type = other DNA
gaggtcatttcatgattatcgaacgtgtataaaaagcatgtgatttcatc

SEQ ID NO: 60731 - DNA, 50 bp, synthetic construct
  source 1..50: mol_type = other DNA
tccgttcagaaaacgatgtggaatataagccgctcatcctgatggaacga

SEQ ID NO: 60732 - DNA, 50 bp, synthetic construct
  source 1..50: mol_type = other DNA
acaaggggaaagcaaccaaaccgtccacggtgatctcactttcaaattgt

SEQ ID NO: 60733 - DNA, 50 bp, synthetic construct
  source 1..50: mol_type = other DNA
tcttcgtcgggcgtggcccgccacctgggcacgccgattgccgccgattt

SEQ ID NO: 60734 - DNA, 50 bp, synthetic construct
  source 1..50: mol_type = other DNA
gtttcgatatttggtcggtgttgggtacaaagccggaaaaaggtgataac

SEQ ID NO: 60735 - DNA, 50 bp, synthetic construct
  source 1..50: mol_type = other DNA
taccgtttcacattcaacttttttattataaaaaagcattacttatcaat

SEQ ID NO: 60736 - DNA, 50 bp, synthetic construct
  source 1..50: mol_type = other DNA
tgcttatctaagtggttcattgaacagccacacagacactcccgccagcc

SEQ ID NO: 60737 - DNA, 50 bp, synthetic construct
  source 1..50: mol_type = other DNA
cttaatcaacttcacagggtctgttaacagatgctgaaaagaccaacgtt

SEQ ID NO: 60738 - DNA, 50 bp, synthetic construct
  source 1..50: mol_type = other DNA
acacttttaaatttttatattttataaggaacggtaaaatgaaaaaatgt

SEQ ID NO: 60739 - DNA, 50 bp, synthetic construct
  source 1..50: mol_type = other DNA
cgcatagtggtagactcgacgtaaatttggccgtcgaaggccacattgcg

SEQ ID NO: 60740 - DNA, 50 bp, synthetic construct
  source 1..50: mol_type = other DNA
ccaaccaaagccatattggctctcatgataatcattatcgttttggccag

SEQ ID NO: 60741 - DNA, 50 bp, synthetic construct
  source 1..50: mol_type = other DNA
gatttgtggctggtgattcatattgccagacaggacaattttcacaagac

SEQ ID NO: 60742 - DNA, 50 bp, synthetic construct
  source 1..50: mol_type = other DNA
taaaaaaatacagcgtttttcatgtagtgcctaaataatgcttttaaaac

SEQ ID NO: 60743 - DNA, 50 bp, synthetic construct
  source 1..50: mol_type = other DNA
tttttaccacttatggtttggactaatttctaaaacataagccctcaaaa

SEQ ID NO: 60744 - DNA, 50 bp, synthetic construct
  source 1..50: mol_type = other DNA
agtaaaatctatttaacatttcattgttacagcctttcgtctactttata

SEQ ID NO: 60745 - DNA, 50 bp, synthetic construct
  source 1..50: mol_type = other DNA
acactatatatcactctaaaaaggatttctattggatataagaaatatgt

SEQ ID NO: 60746 - DNA, 50 bp, synthetic construct
  source 1..50: mol_type = other DNA
ctgtctcatctattactactcgaccagtcgtacctatatagttgagaccg

SEQ ID NO: 60747 - DNA, 50 bp, synthetic construct
  source 1..50: mol_type = other DNA
tgttcttgagaaaagtcgagagatgcaactctacgctttttcaaagagaa

SEQ ID NO: 60748 - DNA, 50 bp, synthetic construct
  source 1..50: mol_type = other DNA
ctcatttcagaagttcgctaccagcactgattatcgttttactttatgcg

SEQ ID NO: 60749 - DNA, 50 bp, synthetic construct
  source 1..50: mol_type = other DNA
ttttaattttcatctcgcaactcgtttacattttatcatagaaatacaaa

SEQ ID NO: 60750 - DNA, 50 bp, synthetic construct
  source 1..50: mol_type = other DNA
gcaactcgttaacaatgattattttcacatattttttgtagtatttttgc

SEQ ID NO: 60751 - DNA, 50 bp, synthetic construct
  source 1..50: mol_type = other DNA
tttttgggctattagtattatttttccactctttacttagtataaaaaat

SEQ ID NO: 60752 - DNA, 50 bp, synthetic construct
  source 1..50: mol_type = other DNA
tttgaacgttttgatcgattagattcatctttttagatgcactaaaatga

SEQ ID NO: 60753 - DNA, 50 bp, synthetic construct
  source 1..50: mol_type = other DNA
tgttaacctatttttctttcgtaaatgtgcgaaaggagaatgagaatgaa

SEQ ID NO: 60754 - DNA, 50 bp, synthetic construct
  source 1..50: mol_type = other DNA
gaacaccaattaatcctgcgctgattctgatgcaaatttaacattccatg

SEQ ID NO: 60755 - DNA, 50 bp, synthetic construct
  source 1..50: mol_type = other DNA
tattagcattggtgacgttggtttttcatactacatcgttgatgaagata

SEQ ID NO: 60756 - DNA, 50 bp, synthetic construct
  source 1..50: mol_type = other DNA
ttaagttctgtaactttaaatcaatctggttcatcggttaagtgtattaa

SEQ ID NO: 60757 - DNA, 50 bp, synthetic construct
  source 1..50: mol_type = other DNA
tgaaatgtttcaaatataaatatgtttatatgtattttgataacacttga

SEQ ID NO: 60758 - DNA, 50 bp, synthetic construct
  source 1..50: mol_type = other DNA
tattttgatttttacgataacttataaatattataccatatattagcatc

SEQ ID NO: 60759 - DNA, 50 bp, synthetic construct
  source 1..50: mol_type = other DNA
ctctgtaaatttcacttccataacaagtaatagaagtgtaaaaaattttg

SEQ ID NO: 60760 - DNA, 50 bp, synthetic construct
  source 1..50: mol_type = other DNA
ttcgagtaccggcccagcgtgtgcaccagaacgttcttactcgaaccgac

SEQ ID NO: 60761 - DNA, 50 bp, synthetic construct
  source 1..50: mol_type = other DNA
tcttgacaaaacgcaggttcgaggttactcgaacccgcgtccgaaaggat

SEQ ID NO: 60762 - DNA, 50 bp, synthetic construct
  source 1..50: mol_type = other DNA
gccgtctgccggcgggcgaccgcggatgcggatgcggatgcgctgaccca

SEQ ID NO: 60763 - DNA, 50 bp, synthetic construct
  source 1..50: mol_type = other DNA
tacaggtattatacgacagacttgatcaagtcgtccatattttacctgta

SEQ ID NO: 60764 - DNA, 50 bp, synthetic construct
  source 1..50: mol_type = other DNA
aaatgataagcagaaagatatttttaatcatatcattaatatttatatgt

SEQ ID NO: 60765 - DNA, 50 bp, synthetic construct
  source 1..50: mol_type = other DNA
accctgattgtgcccatcctcaccccgatcaggccaacaaatatcccggt

SEQ ID NO: 60766 - DNA, 50 bp, synthetic construct
  source 1..50: mol_type = other DNA
cggcaccatcgcggcggcggcgttcgatactggccgccctgccggtgctg

SEQ ID NO: 60767 - DNA, 50 bp, synthetic construct
  source 1..50: mol_type = other DNA
tataaaaacctcattcttaaccgatatcataaatgatgcggttttttagt

SEQ ID NO: 60768 - DNA, 50 bp, synthetic construct
  source 1..50: mol_type = other DNA
atcgttatctacaataaacaatacttgataaattaaacgcaattaacgaa

SEQ ID NO: 60769 - DNA, 50 bp, synthetic construct
  source 1..50: mol_type = other DNA
tttagagcaaactcttttataatactatctataatagcgtttgctatagg

SEQ ID NO: 60770 - DNA, 50 bp, synthetic construct
  source 1..50: mol_type = other DNA
tttggttagtaccattaatcactctagcgtgtattgactaactatatcat

SEQ ID NO: 60771 - DNA, 50 bp, synthetic construct
  source 1..50: mol_type = other DNA
caggttaatttcctatttagaaaaacaaaaaatccgaccaaagttattta

SEQ ID NO: 60772 - DNA, 50 bp, synthetic construct
  source 1..50: mol_type = other DNA
ctatttatcaaatttaacctattacctgtgcttcataacttgataattgt

SEQ ID NO: 60773 - DNA, 50 bp, synthetic construct
  source 1..50: mol_type = other DNA
tgtgtaaacgtatcagagtctgtatacacagagtctcatatgttacaacc

SEQ ID NO: 60774 - DNA, 50 bp, synthetic construct
  source 1..50: mol_type = other DNA
tggttacggagtgtacagaagtgcgaccactttcggccactccgtaaaca

SEQ ID NO: 60775 - DNA, 50 bp, synthetic construct
  source 1..50: mol_type = other DNA
tttactataataaaattgtttagatttcccgaaaatgttgaaataggaaa

SEQ ID NO: 60776 - DNA, 50 bp, synthetic construct
  source 1..50: mol_type = other DNA
tgtatcaaaatgaacgtctaagtaaccaaaggacgctccggccaccgaat

SEQ ID NO: 60777 - DNA, 50 bp, synthetic construct
  source 1..50: mol_type = other DNA
cctgacggaattgtactatttggaattccgtatgaagctgcggaaaggag

SEQ ID NO: 60778 - DNA, 50 bp, synthetic construct
  source 1..50: mol_type = other DNA
tagcaccgaagatatactaatagagttctatcgtgataacttttttcatg

SEQ ID NO: 60779 - DNA, 50 bp, synthetic construct
  source 1..50: mol_type = other DNA
gatttcataaagtgattgatgatatataagagaaatcaccattagtgttg

SEQ ID NO: 60780 - DNA, 50 bp, synthetic construct
  source 1..50: mol_type = other DNA
ccgagataaaaatggtttgaaagtttggtttgaagcgacttatatcccga

SEQ ID NO: 60781 - DNA, 50 bp, synthetic construct
  source 1..50: mol_type = other DNA
gtttaccttttctagcatcacggtgaaccgtatcataagtaacggtaaac

SEQ ID NO: 60782 - DNA, 50 bp, synthetic construct
  source 1..50: mol_type = other DNA
cgtaaagcattacccgacttaagcacgcttaaccagtacaaagctggtaa

SEQ ID NO: 60783 - DNA, 50 bp, synthetic construct
  source 1..50: mol_type = other DNA
attactgttttatccagcccctgcatggcgacactggataaaacagtaat

SEQ ID NO: 60784 - DNA, 50 bp, synthetic construct
  source 1..50: mol_type = other DNA
tagactcgacgtaaatgattatcaattgattgccatgctggttttatgta

SEQ ID NO: 60785 - DNA, 50 bp, synthetic construct
  source 1..50: mol_type = other DNA
tagctacactttttacatgttttatacaccacagttaatggaggtaagta

SEQ ID NO: 60786 - DNA, 50 bp, synthetic construct
  source 1..50: mol_type = other DNA
atgctaatgaggaaaatattataaattttacaaaaaatcaaaacctgtta

SEQ ID NO: 60787 - DNA, 50 bp, synthetic construct
  source 1..50: mol_type = other DNA
caatttacaaatagataagcctctatggaggttcatctatgaacaaatta

SEQ ID NO: 60788 - DNA, 50 bp, synthetic construct
  source 1..50: mol_type = other DNA
tcacttttaccacttttttagagtgaacaacaaaaaataggtaatttctt

SEQ ID NO: 60789 - DNA, 50 bp, synthetic construct
  source 1..50: mol_type = other DNA
cttttcccgacgtttccttgatttattataacattaaaatagaaaaaaag

SEQ ID NO: 60790 - DNA, 50 bp, synthetic construct
  source 1..50: mol_type = other DNA
aaactaatttagtcaaactttacatgttataacaatgattctattagcta

SEQ ID NO: 60791 - DNA, 50 bp, synthetic construct
  source 1..50: mol_type = other DNA
gtattcctatcctattgacaacacatgtggagtgcatagcgttgatacaa

SEQ ID NO: 60792 - DNA, 50 bp, synthetic construct
  source 1..50: mol_type = other DNA
tttgaaatattttataaatatatatttacataaaatcaatcattttaata

SEQ ID NO: 60793 - DNA, 50 bp, synthetic construct
  source 1..50: mol_type = other DNA
tcgtttgatagtataggaatacactagtgttgctacaacgaagcaacggg

SEQ ID NO: 60794 - DNA, 50 bp, synthetic construct
  source 1..50: mol_type = other DNA
tattttacttgatgaacctacggggaggaatttcagtatgaaaaaaaata

SEQ ID NO: 60795 - DNA, 50 bp, synthetic construct
  source 1..50: mol_type = other DNA
tcaaaaatcatgaacctcattacttatcgcttggtgatgcggttttttga

SEQ ID NO: 60796 - DNA, 50 bp, synthetic construct
  source 1..50: mol_type = other DNA
tttctgttaaaataggtatggtaaaattttccactctattttaatatatc

SEQ ID NO: 60797 - DNA, 50 bp, synthetic construct
  source 1..50: mol_type = other DNA
tttgttcattgtttaatacctcacttgcctttttttagcagctgaaataa

SEQ ID NO: 60798 - DNA, 50 bp, synthetic construct
  source 1..50: mol_type = other DNA
gcgggcagcagaaatgcttggcaaagtcgacaagcatttactctaattga

SEQ ID NO: 60799 - DNA, 50 bp, synthetic construct
  source 1..50: mol_type = other DNA
aaaaaaataaaaaaagatgacaatattttatcattttttagagaatttta

SEQ ID NO: 60800 - DNA, 50 bp, synthetic construct
  source 1..50: mol_type = other DNA
attgctcaaaaggatttcgaaactttagttaagaaaggagtatgtgcaaa

SEQ ID NO: 60801 - DNA, 50 bp, synthetic construct
  source 1..50: mol_type = other DNA
tgtttccctttgtatggtggtggaaatgcgccaccatccaaacggcaact

SEQ ID NO: 60802 - DNA, 50 bp, synthetic construct
  source 1..50: mol_type = other DNA
ttttctttgctggaataactgtaatatctgagttaaactattaaacgtaa

SEQ ID NO: 60803 - DNA, 50 bp, synthetic construct
  source 1..50: mol_type = other DNA
tatatatcactctaacggctggatttgtaacataatcttgttgatagata

SEQ ID NO: 60804 - DNA, 50 bp, synthetic construct
  source 1..50: mol_type = other DNA
tttagaagtgtctattttggatatgaatacataaaataattacttaaaaa

SEQ ID NO: 60805 - DNA, 50 bp, synthetic construct
  source 1..50: mol_type = other DNA
cattgtgaaaaacttgcagtttgctaccaaactgcaagtattccacagaa

SEQ ID NO: 60806 - DNA, 50 bp, synthetic construct
  source 1..50: mol_type = other DNA
tactgtatttatatttgtcgtggaacagcaacgcaaatataaataccgta

SEQ ID NO: 60807 - DNA, 50 bp, synthetic construct
  source 1..50: mol_type = other DNA
atattggtggatttcaaaggtcgtgcctccaccatgaaaccctcgactaa

SEQ ID NO: 60808 - DNA, 50 bp, synthetic construct
  source 1..50: mol_type = other DNA
actcaactttccgctttactatcactaactagtaaagcgtcatcttgacc

SEQ ID NO: 60809 - DNA, 50 bp, synthetic construct
  source 1..50: mol_type = other DNA
caagtttcaccatgttaccttacatttgaaaggtaatctagtgaaacctc

SEQ ID NO: 60810 - DNA, 50 bp, synthetic construct
  source 1..50: mol_type = other DNA
ttctcatagttagccctcccttagattatagacaatgcaaatgaaaaatt

SEQ ID NO: 60811 - DNA, 50 bp, synthetic construct
  source 1..50: mol_type = other DNA
ttctaaagcaacagagttacgaacaagaacatactcctgttgtagtaaaa

SEQ ID NO: 60812 - DNA, 50 bp, synthetic construct
  source 1..50: mol_type = other DNA
gtgctgggcggtgtggagcgttccggcgcgcctgccggtgtggccggcgg

SEQ ID NO: 60813 - DNA, 50 bp, synthetic construct
  source 1..50: mol_type = other DNA
ttgcaataatgaatccaaatcttttaatgcatgtgtctgatttatttcac

SEQ ID NO: 60814 - DNA, 50 bp, synthetic construct
  source 1..50: mol_type = other DNA
aatatctttaactaagggaaactggaagaggctgaacatgctgctaaatt

SEQ ID NO: 60815 - DNA, 50 bp, synthetic construct
  source 1..50: mol_type = other DNA
atcctcttttaatcaaacaatcccccgggatttaatgataaaaaatggtc

SEQ ID NO: 60816 - DNA, 50 bp, synthetic construct
  source 1..50: mol_type = other DNA
gttatgcctcagtatacaatcggttctcctattgtatactgaggcaaaac

SEQ ID NO: 60817 - DNA, 50 bp, synthetic construct
  source 1..50: mol_type = other DNA
gcaaaacaatatttattttatattattttatattataatctgcattttgt

SEQ ID NO: 60818 - DNA, 50 bp, synthetic construct
  source 1..50: mol_type = other DNA
atcaccactcggaacagcactccgaccagagggctgttgctcatggtggt

SEQ ID NO: 60819 - DNA, 50 bp, synthetic construct
  source 1..50: mol_type = other DNA
cccggtgagttgttccacctacgcgagcgtacatggatacaaccaccaaa

SEQ ID NO: 60820 - DNA, 50 bp, synthetic construct
  source 1..50: mol_type = other DNA
aggcacgagcaccaccggagcacctaggtagccgtagcgtccccgtgtct

SEQ ID NO: 60821 - DNA, 50 bp, synthetic construct
  source 1..50: mol_type = other DNA
ccgctgcttgttgatctgtcaagcgaacgtggaccttcaaggggctgtgg

SEQ ID NO: 60822 - DNA, 50 bp, synthetic construct
  source 1..50: mol_type = other DNA
tttagaacgatctcaaaacttagctactcatattttgagtaagttcttac

SEQ ID NO: 60823 - DNA, 50 bp, synthetic construct
  source 1..50: mol_type = other DNA
tatagatttaatttttactttcttataaaataatggaaagttgttctata

SEQ ID NO: 60824 - DNA, 50 bp, synthetic construct
  source 1..50: mol_type = other DNA
ttcaaccgctatcttggtttctttataaaataatggaaagttgttctata

SEQ ID NO: 60825 - DNA, 50 bp, synthetic construct
  source 1..50: mol_type = other DNA
ataggagcgacacggcaaaagggcttaccgttttcgcatgttcctcttgt

SEQ ID NO: 60826 - DNA, 50 bp, synthetic construct
  source 1..50: mol_type = other DNA
tcttaacaatcttttgtaaaaaaatattttttatataatttttattatga

SEQ ID NO: 60827 - DNA, 50 bp, synthetic construct
  source 1..50: mol_type = other DNA
tactttttagatatattttttaattttatataaaataagaaataaacagt

SEQ ID NO: 60828 - DNA, 50 bp, synthetic construct
  source 1..50: mol_type = other DNA
tggacctgctgctggccgccggggtaccccaacgccaagctgatcatcca

SEQ ID NO: 60829 - DNA, 50 bp, synthetic construct
  source 1..50: mol_type = other DNA
caagtcgatgcgggcgcagctaaagtctttagatgtggccattgcttttg

SEQ ID NO: 60830 - DNA, 50 bp, synthetic construct
  source 1..50: mol_type = other DNA
taggaagtgaggtgccgctgaacagctgttcagagccttcagtcttccag

SEQ ID NO: 60831 - DNA, 50 bp, synthetic construct
  source 1..50: mol_type = other DNA
acaggagcgccgaaggatgtgggagaggccacgacatagccttttccttc

SEQ ID NO: 60832 - DNA, 50 bp, synthetic construct
  source 1..50: mol_type = other DNA
tgttgtactaatttgatactacccgtagggcgtataaagttagtataaca

SEQ ID NO: 60833 - DNA, 50 bp, synthetic construct
  source 1..50: mol_type = other DNA
tatcgttctgctctggctcatcgtcaaggatccggatgtggactatgata

SEQ ID NO: 60834 - DNA, 50 bp, synthetic construct
  source 1..50: mol_type = other DNA
attcctgttcataggttctctcctttagggcagttgagacaaaaagcggc

SEQ ID NO: 60835 - DNA, 50 bp, synthetic construct
  source 1..50: mol_type = other DNA
tttgaaagacaggatagatattcgttcggtacatttttttgtcttccaaa

SEQ ID NO: 60836 - DNA, 50 bp, synthetic construct
  source 1..50: mol_type = other DNA
tccgtttttatctgtcatttttatttcttatgtcaatagataaatacgaa

SEQ ID NO: 60837 - DNA, 50 bp, synthetic construct
  source 1..50: mol_type = other DNA
ctttccggccagcggcgccaggccgccggctggccgccctggttatttct

SEQ ID NO: 60838 - DNA, 50 bp, synthetic construct
  source 1..50: mol_type = other DNA
tggttttatatttagtaaaaacgtataatcggttatttaataacttttcc

SEQ ID NO: 60839 - DNA, 50 bp, synthetic construct
  source 1..50: mol_type = other DNA
ggaggtatggatattcatttaaaacggttccaatgcatacggtattcgtt

SEQ ID NO: 60840 - DNA, 50 bp, synthetic construct
  source 1..50: mol_type = other DNA
ggtatcagtgtaacatcccttttcaagaaatgtcacttccatctgatacc

SEQ ID NO: 60841 - DNA, 50 bp, synthetic construct
  source 1..50: mol_type = other DNA
ttaaatctgaataataccagtttgattgaatcgacattattctgacctaa

SEQ ID NO: 60842 - DNA, 50 bp, synthetic construct
  source 1..50: mol_type = other DNA
cgtgcagctggccactgtcgaagtcgcctctcacagctgccagctgggaa

SEQ ID NO: 60843 - DNA, 50 bp, synthetic construct
  source 1..50: mol_type = other DNA
atttaatatcctcacaacccttatcaataagattagagagaataattttg

SEQ ID NO: 60844 - DNA, 50 bp, synthetic construct
  source 1..50: mol_type = other DNA
cttacttatttttttaaatgctataatcaatatttcaaaaaataagttag

SEQ ID NO: 60845 - DNA, 50 bp, synthetic construct
  source 1..50: mol_type = other DNA
ggctataccataagagacggaagatttcttgctgctctttgaataatacg

SEQ ID NO: 60846 - DNA, 50 bp, synthetic construct
  source 1..50: mol_type = other DNA
atggtgattaaaagtgaaaatatatactaatttttactttttttgccaat

SEQ ID NO: 60847 - DNA, 50 bp, synthetic construct
  source 1..50: mol_type = other DNA
cataaggatcacgacggccgctcgaccgggcggccgcggtgcgcctcgtc

SEQ ID NO: 60848 - DNA, 50 bp, synthetic construct
  source 1..50: mol_type = other DNA
gataaggtgctaagagctcttttccaaaaagctactcttatcattttatc

SEQ ID NO: 60849 - DNA, 50 bp, synthetic construct
  source 1..50: mol_type = other DNA
atgataagggaaaaacttagaaaaaacggaaaaagttttgggaacattga

SEQ ID NO: 60850 - DNA, 50 bp, synthetic construct
  source 1..50: mol_type = other DNA
tagctaaaaaggatcttaagattaagtaatcgtaacatgtgacagtaaaa

SEQ ID NO: 60851 - DNA, 50 bp, synthetic construct
  source 1..50: mol_type = other DNA
tgtaccggcacgcaggtgggtggcggcgcggcgcgatgcctgcttgtcga

SEQ ID NO: 60852 - DNA, 50 bp, synthetic construct
  source 1..50: mol_type = other DNA
ccgaacgccagcgcagcagtgtggccgaacaggtagcaaatgaagttcag

SEQ ID NO: 60853 - DNA, 50 bp, synthetic construct
  source 1..50: mol_type = other DNA
ctttcaaactcatcttcgtcaaattcatttgaataagacattttcttata

SEQ ID NO: 60854 - DNA, 50 bp, synthetic construct
  source 1..50: mol_type = other DNA
ggtaaagccagaaaaactgactgccacgcgccgctttttccggctgctga

SEQ ID NO: 60855 - DNA, 50 bp, synthetic construct
  source 1..50: mol_type = other DNA
atacccacttttatagacgtactatgtggtatggatatataagtgggtac

SEQ ID NO: 60856 - DNA, 50 bp, synthetic construct
  source 1..50: mol_type = other DNA
cgtggcactttttccatcatctgcatccagataggaaagtttactggaca

SEQ ID NO: 60857 - DNA, 50 bp, synthetic construct
  source 1..50: mol_type = other DNA
tttccaggacactccataaccgattatcccagtggtatgtgtctctgagc

SEQ ID NO: 60858 - DNA, 50 bp, synthetic construct
  source 1..50: mol_type = other DNA
gtattattgacgaactgtctaaaatcatttccacatacaatcaataagga

SEQ ID NO: 60859 - DNA, 50 bp, synthetic construct
  source 1..50: mol_type = other DNA
ttcaaatattctcaaaaaacaatcatgattaaaggagatgatagaatgaa

SEQ ID NO: 60860 - DNA, 50 bp, synthetic construct
  source 1..50: mol_type = other DNA
tgtaaaatagtagactgtatagaaacgccttgacaagctcaattttatca

SEQ ID NO: 60861 - DNA, 50 bp, synthetic construct
  source 1..50: mol_type = other DNA
cccgacacaccagcttaccagccagctggccgataaacttttgcttgttc

SEQ ID NO: 60862 - DNA, 50 bp, synthetic construct
  source 1..50: mol_type = other DNA
tgttgctctgccgccgccatgcgaaacgttatggctcttgcgggacataa

SEQ ID NO: 60863 - DNA, 50 bp, synthetic construct
  source 1..50: mol_type = other DNA
aataattatccaaaaatatgaagacagcttcatcctcgttaatcgtggcg

SEQ ID NO: 60864 - DNA, 50 bp, synthetic construct
  source 1..50: mol_type = other DNA
acgacctttcccttgacaaaaaactggtttttgttccacagtaaggacat

SEQ ID NO: 60865 - DNA, 50 bp, synthetic construct
  source 1..50: mol_type = other DNA
atcgctgcggctatgatataataggtacatcgctgctgcgccggatggaa

SEQ ID NO: 60866 - DNA, 50 bp, synthetic construct
  source 1..50: mol_type = other DNA
ctgtatattttacgtttggtcatgtggctgaccaaacccaaaatccaatt

SEQ ID NO: 60867 - DNA, 50 bp, synthetic construct
  source 1..50: mol_type = other DNA
caaaaactccaagtgtaggctgggtactcagaataaacttggcatctgtg

SEQ ID NO: 60868 - DNA, 50 bp, synthetic construct
  source 1..50: mol_type = other DNA
gatcagcctacctcacggatcggcgcgcgtcgtcgcggcgatgccggcgg

SEQ ID NO: 60869 - DNA, 50 bp, synthetic construct
  source 1..50: mol_type = other DNA
ctgcttggcagcgtcctcggccgccggagaagggcaaggggctcaagctg

SEQ ID NO: 60870 - DNA, 50 bp, synthetic construct
  source 1..50: mol_type = other DNA
ttaacgtaatagcataatataaaactttttatattatgctattttattaa

SEQ ID NO: 60871 - DNA, 50 bp, synthetic construct
  source 1..50: mol_type = other DNA
tgttttgtgtccatacacaatctgctgacattgtgataggttacaaaaca

SEQ ID NO: 60872 - DNA, 50 bp, synthetic construct
  source 1..50: mol_type = other DNA
gatctcaacatacgaattgactacgcataacctgttcgtatagcgctatg

SEQ ID NO: 60873 - DNA, 50 bp, synthetic construct
  source 1..50: mol_type = other DNA
gagtgtaacaaacgaatatcttggtcgcaagtattttgtttatgacactg

SEQ ID NO: 60874 - DNA, 50 bp, synthetic construct
  source 1..50: mol_type = other DNA
ggcacctcaaaaaaacactgggttaataccccgtatatttcagcgccacc

SEQ ID NO: 60875 - DNA, 50 bp, synthetic construct
  source 1..50: mol_type = other DNA
aatttcactgaagctcatcagggtgcatgctccaagtatgcagtggaatt

SEQ ID NO: 60876 - DNA, 50 bp, synthetic construct
  source 1..50: mol_type = other DNA
caacgtggtgtaacaaaagaaaatgtttctctgaatgttacactgcggct

SEQ ID NO: 60877 - DNA, 50 bp, synthetic construct
  source 1..50: mol_type = other DNA
gccagcctaatcactgtataaatagatatgcattgattgatttcagagtc

SEQ ID NO: 60878 - DNA, 50 bp, synthetic construct
  source 1..50: mol_type = other DNA
tgactgcgatactatcacgtactcttggatatctattagtatcgcatcga

SEQ ID NO: 60879 - DNA, 50 bp, synthetic construct
  source 1..50: mol_type = other DNA
gtgtaaataagattgttcaaagtgcaaacgattaacgctcttatttattg

SEQ ID NO: 60880 - DNA, 50 bp, synthetic construct
  source 1..50: mol_type = other DNA
attatgtttgattatgacaagagtataaataacaatcaaattttaatgtg

SEQ ID NO: 60881 - DNA, 50 bp, synthetic construct
  source 1..50: mol_type = other DNA
aaaatgtcatagtgttggtaataacttcattaccaacactattacagatt

SEQ ID NO: 60882 - DNA, 50 bp, synthetic construct
  source 1..50: mol_type = other DNA
tgagctacaaaattcctgtatttatgaaaatacagccatttagcgaatca

SEQ ID NO: 60883 - DNA, 50 bp, synthetic construct
  source 1..50: mol_type = other DNA
accaaatttggttttgaccaattgtgcaattctttcaaccgcattttgtg

SEQ ID NO: 60884 - DNA, 50 bp, synthetic construct
  source 1..50: mol_type = other DNA
ataaatcaagggcttgaatgtggcgggctacatgggacgaatatgggaac

SEQ ID NO: 60885 - DNA, 50 bp, synthetic construct
  source 1..50: mol_type = other DNA
attaaatttttataatttttgttgtacaactatattttgaactttttaag

SEQ ID NO: 60886 - DNA, 50 bp, synthetic construct
  source 1..50: mol_type = other DNA
tagctcttacttcatctgattgggcaatcaagcaatctatctattgatag

SEQ ID NO: 60887 - DNA, 50 bp, synthetic construct
  source 1..50: mol_type = other DNA
atcttttgtattaccttcatggtgtacaagcaaaaggacatacagtaccg

SEQ ID NO: 60888 - DNA, 50 bp, synthetic construct
  source 1..50: mol_type = other DNA
cgggccagcagcgcctcggccccggccaggcatacggggctggtggtccg

SEQ ID NO: 60889 - DNA, 50 bp, synthetic construct
  source 1..50: mol_type = other DNA
cacagtccccatcgttcgggtggacgtcagcccgcccgatgggatcacgg

SEQ ID NO: 60890 - DNA, 50 bp, synthetic construct
  source 1..50: mol_type = other DNA
gttgtgtacaggttgatgttccacgagtcggacagcaacctccacaaaac

SEQ ID NO: 60891 - DNA, 50 bp, synthetic construct
  source 1..50: mol_type = other DNA
agaaagtttcctttctatttatttaaaaagcattaaaaagctgtttttct

SEQ ID NO: 60892 - DNA, 50 bp, synthetic construct
  source 1..50: mol_type = other DNA
gcgtcaagcctcgcctggtgacgggcccttcgccaggcgctcgacgatac

SEQ ID NO: 60893 - DNA, 50 bp, synthetic construct
  source 1..50: mol_type = other DNA
tgttatcgcctatattataaccaagtattgttaatggatttaccgtaatt

SEQ ID NO: 60894 - DNA, 50 bp, synthetic construct
  source 1..50: mol_type = other DNA
aaaacgcaaaaaatacatggaaaaatttttgtacccttttttacatattt

SEQ ID NO: 60895 - DNA, 50 bp, synthetic construct
  source 1..50: mol_type = other DNA
ctttatacgactgaacacctataggtgattaggtgtgcacgcgtataaac

SEQ ID NO: 60896 - DNA, 50 bp, synthetic construct
  source 1..50: mol_type = other DNA
gcaggagcgcggcgacgagcaggacgttctgctgtcggccagcctcccgc

SEQ ID NO: 60897 - DNA, 50 bp, synthetic construct
  source 1..50: mol_type = other DNA
ggtgggctcatcggcaaagagaatctatctgctgtgccgatggaatataa

SEQ ID NO: 60898 - DNA, 50 bp, synthetic construct
  source 1..50: mol_type = other DNA
taatatatagtaaaaattattgaatattcaaagatataacatatataata

SEQ ID NO: 60899 - DNA, 50 bp, synthetic construct
  source 1..50: mol_type = other DNA
agcatgccacaggaaaactgcgccgttcgcccattttcccatcctattcc

SEQ ID NO: 60900 - DNA, 50 bp, synthetic construct
  source 1..50: mol_type = other DNA
gtcccggaccccgccgggtacgggcgcccgttttcgatccggtagccgta

SEQ ID NO: 60901 - DNA, 50 bp, synthetic construct
  source 1..50: mol_type = other DNA
acaacggctgcttcctcgtccacaagttgggacgacacggcaaggcaaag

SEQ ID NO: 60902 - DNA, 50 bp, synthetic construct
  source 1..50: mol_type = other DNA
ccggcagtcaaacaagcagtatttacaaaagctatttgtctgactgatgg

SEQ ID NO: 60903 - DNA, 50 bp, synthetic construct
  source 1..50: mol_type = other DNA
ttcatctaaaaaaagaactgatctctgcagcaattctattttttgatcgt

SEQ ID NO: 60904 - DNA, 50 bp, synthetic construct
  source 1..50: mol_type = other DNA
aagaaatttggttatttttttggaagaccataaaaatataaaaaattatg

SEQ ID NO: 60905 - DNA, 50 bp, synthetic construct
  source 1..50: mol_type = other DNA
gcgcgcgctggaacgggcaagttcgcgagcttgcccttgatctcgatctc

SEQ ID NO: 60906 - DNA, 50 bp, synthetic construct
  source 1..50: mol_type = other DNA
tttgacaatacggaacggatattcggcaatctctgtttcgtattgttctt

SEQ ID NO: 60907 - DNA, 50 bp, synthetic construct
  source 1..50: mol_type = other DNA
ttattaacatctgggtggtaatgaccgcctttgatagcaggtatgtttaa

SEQ ID NO: 60908 - DNA, 50 bp, synthetic construct
  source 1..50: mol_type = other DNA
ttttttataggtaatagtttgttatatgacaaactatattattcttcaaa

SEQ ID NO: 60909 - DNA, 50 bp, synthetic construct
  source 1..50: mol_type = other DNA
caattacgtaatcaaaaccagaagtacttctgattttcatatttcaattt

SEQ ID NO: 60910 - DNA, 50 bp, synthetic construct
  source 1..50: mol_type = other DNA
ctaatagcaaggtttttaggacataaatgtcattcaaaagactatattag

SEQ ID NO: 60911 - DNA, 50 bp, synthetic construct
  source 1..50: mol_type = other DNA
attctggtcttgatttgtggcttcgtgaatcgtcgaatcaagaccactac

SEQ ID NO: 60912 - DNA, 50 bp, synthetic construct
  source 1..50: mol_type = other DNA
atatatttactccttttcagataacgatgaaataaaaggtattgatataa

SEQ ID NO: 60913 - DNA, 50 bp, synthetic construct
  source 1..50: mol_type = other DNA
tgttgttgcacctgctcgaacaagccattgtgcgctgtatggcaaggcaa

SEQ ID NO: 60914 - DNA, 50 bp, synthetic construct
  source 1..50: mol_type = other DNA
atgggatagcggttatcgatgaagaaattattagaaaagacacatagagg

SEQ ID NO: 60915 - DNA, 50 bp, synthetic construct
  source 1..50: mol_type = other DNA
acattgacttcataaatgaccgccatattgccgctttatttagtctaact

SEQ ID NO: 60916 - DNA, 50 bp, synthetic construct
  source 1..50: mol_type = other DNA
ccaatccaaatagcttttccatctattatcggaaaatgacttgatataat

SEQ ID NO: 60917 - DNA, 50 bp, synthetic construct
  source 1..50: mol_type = other DNA
aacgcgctaaaatgctaagaataagtaccccttaactgttttagctcgtt

SEQ ID NO: 60918 - DNA, 50 bp, synthetic construct
  source 1..50: mol_type = other DNA
attataacgataggggcattggttagaaatttcccgtttatacggctata

SEQ ID NO: 60919 - DNA, 50 bp, synthetic construct
  source 1..50: mol_type = other DNA
agcgaccaggatctacgtactctttaagaatataccttattctggtatca

SEQ ID NO: 60920 - DNA, 50 bp, synthetic construct
  source 1..50: mol_type = other DNA
tatatataaatattaactgttatcataataacagttataatttacttatt

SEQ ID NO: 60921 - DNA, 50 bp, synthetic construct
  source 1..50: mol_type = other DNA
tgcttttttgctcttcatgtaaaaagttttaccgtggaattatcaaaaag

SEQ ID NO: 60922 - DNA, 50 bp, synthetic construct
  source 1..50: mol_type = other DNA
catttacattttctatttcttcaacttttaattcgtagaaaaacagtgct

SEQ ID NO: 60923 - DNA, 50 bp, synthetic construct
  source 1..50: mol_type = other DNA
agccctttagaggctcttagtttgcgcaaactaaaacaataataatcact

SEQ ID NO: 60924 - DNA, 50 bp, synthetic construct
  source 1..50: mol_type = other DNA
tccaaaagagagattgacaattatagtaaataagtgggtgaagattttga

SEQ ID NO: 60925 - DNA, 50 bp, synthetic construct
  source 1..50: mol_type = other DNA
tgggtatatgatgaagtgttgtactggtttaattgcctatcatatacccg

SEQ ID NO: 60926 - DNA, 50 bp, synthetic construct
  source 1..50: mol_type = other DNA
ccgagtaaaaatagaaaattaacatttgtaatttttctatttttattggc

SEQ ID NO: 60927 - DNA, 50 bp, synthetic construct
  source 1..50: mol_type = other DNA
cactgacaacatgttggtgcaaatgtatctgatccatcatgttatcagta

SEQ ID NO: 60928 - DNA, 50 bp, synthetic construct
  source 1..50: mol_type = other DNA
cgataatttcaactttagatgcatcaacttgagcaacttggagattatcg

SEQ ID NO: 60929 - DNA, 50 bp, synthetic construct
  source 1..50: mol_type = other DNA
ttatataaataattataaaaaatatttaccttttaagttaataaatataa

SEQ ID NO: 60930 - DNA, 50 bp, synthetic construct
  source 1..50: mol_type = other DNA
tttatataatactacttaattataatttatatattataatattctttatt

SEQ ID NO: 60931 - DNA, 50 bp, synthetic construct
  source 1..50: mol_type = other DNA
cttattataaataaaaaccaatctcttacttttattttacatagaatatc

SEQ ID NO: 60932 - DNA, 50 bp, synthetic construct
  source 1..50: mol_type = other DNA
ggtcggcccaactgctcaatgcccgaggggacgagagtagcgcaaatgga

SEQ ID NO: 60933 - DNA, 50 bp, synthetic construct
  source 1..50: mol_type = other DNA
agatgtgtctcttcagaatcacgcggacggctgtcgaggattacacccat

SEQ ID NO: 60934 - DNA, 50 bp, synthetic construct
  source 1..50: mol_type = other DNA
atgtacggaacccccgcaaattgcgagaccttttagacccttccgtgtgc

SEQ ID NO: 60935 - DNA, 50 bp, synthetic construct
  source 1..50: mol_type = other DNA
ccgacttgagtacctttgcagcacctgtgcggcatagcctatcgggacga

SEQ ID NO: 60936 - DNA, 50 bp, synthetic construct
  source 1..50: mol_type = other DNA
attcaaatttatgctttactatcactaactagtaaagcgccatcttgacc

SEQ ID NO: 60937 - DNA, 50 bp, synthetic construct
  source 1..50: mol_type = other DNA
tacataaaaccagcatggcaatcaattgataatcatttacgtcgagtcta

SEQ ID NO: 60938 - DNA, 50 bp, synthetic construct
  source 1..50: mol_type = other DNA
atggtcaagcagagattagcgaatcacttctccaatctcttcattactcg

SEQ ID NO: 60939 - DNA, 50 bp, synthetic construct
  source 1..50: mol_type = other DNA
tttatttttatgattttgataatcatgatgaaaaagataacaaaaataaa

SEQ ID NO: 60940 - DNA, 50 bp, synthetic construct
  source 1..50: mol_type = other DNA
aataatattttaataactattgtattccgaaaagatataaaattctagcg

SEQ ID NO: 60941 - DNA, 50 bp, synthetic construct
  source 1..50: mol_type = other DNA
ttttgcatctcgtttcttctccgtccaacgagagataacgagatactaaa

SEQ ID NO: 60942 - DNA, 50 bp, synthetic construct
  source 1..50: mol_type = other DNA
ggagttattgggccaataatatttgtaaatctaattacaccaacaaggtg

SEQ ID NO: 60943 - DNA, 50 bp, synthetic construct
  source 1..50: mol_type = other DNA
atctaccgcaaagtataggtatttaacaaaccctatacttctacgatccg

SEQ ID NO: 60944 - DNA, 50 bp, synthetic construct
  source 1..50: mol_type = other DNA
gtcgccagctccgcgtcgaccgcggccaggcgggacgggcggctgcgggt

SEQ ID NO: 60945 - DNA, 50 bp, synthetic construct
  source 1..50: mol_type = other DNA
atggtacgcatgatggacccgagttttcgcgaagtcaaaatggttaccgg

SEQ ID NO: 60946 - DNA, 50 bp, synthetic construct
  source 1..50: mol_type = other DNA
agaaaacagaagtcgttattcgtttcaagtgtcttacgggaacagttaca

SEQ ID NO: 60947 - DNA, 50 bp, synthetic construct
  source 1..50: mol_type = other DNA
tataaataaaaatctttttcctgcatgcccaaaattccttgatatataag

SEQ ID NO: 60948 - DNA, 50 bp, synthetic construct
  source 1..50: mol_type = other DNA
ggggatgtattgtatttcctgtgtttccatatgggtgaggttgctgccct

SEQ ID NO: 60949 - DNA, 50 bp, synthetic construct
  source 1..50: mol_type = other DNA
tgacggcgcggagggtcatgggcgcattgccgggaccagccgcgcacgtc

SEQ ID NO: 60950 - DNA, 50 bp, synthetic construct
  source 1..50: mol_type = other DNA
gcaggccaccccggcgatgccgcggcgacatcatcgccggccctgccgct

SEQ ID NO: 60951 - DNA, 50 bp, synthetic construct
  source 1..50: mol_type = other DNA
gcgcgggtcgaggtgctgcctcccgcccatcgttcccattcccgccgctt

SEQ ID NO: 60952 - DNA, 50 bp, synthetic construct
  source 1..50: mol_type = other DNA
ttgggccgggaagtccaagtgcgccactcctctgttttgacgagttccag

SEQ ID NO: 60953 - DNA, 50 bp, synthetic construct
  source 1..50: mol_type = other DNA
atggatttaatagtggtgttattctagaaaatatccattattcaagggtt

SEQ ID NO: 60954 - DNA, 50 bp, synthetic construct
  source 1..50: mol_type = other DNA
tttaaggagaatcactatgaaaaggagcgcagacggtcatggcagataaa

SEQ ID NO: 60955 - DNA, 50 bp, synthetic construct
  source 1..50: mol_type = other DNA
gaattagatgggtcacacaccctatggatagtgtatgatgattctgtctt

SEQ ID NO: 60956 - DNA, 50 bp, synthetic construct
  source 1..50: mol_type = other DNA
tttttgttcttctgataaatatatcataaaatctttcggatcaacaaaaa

SEQ ID NO: 60957 - DNA, 50 bp, synthetic construct
  source 1..50: mol_type = other DNA
ctttataaaggcttaaaaaacaggaatatggctttaaacgcattttaaag

SEQ ID NO: 60958 - DNA, 50 bp, synthetic construct
  source 1..50: mol_type = other DNA
gtaaaatgtttccgttatgggagaatacctccacaacggaaacattaaat

SEQ ID NO: 60959 - DNA, 50 bp, synthetic construct
  source 1..50: mol_type = other DNA
tcaatgttcttataaaccgaaaaaagttagcggggatgtaaccaaattta

SEQ ID NO: 60960 - DNA, 50 bp, synthetic construct
  source 1..50: mol_type = other DNA
tggcgtgctggagcacgtccgggagggagatgaagaagagcaagtcgcca

SEQ ID NO: 60961 - DNA, 50 bp, synthetic construct
  source 1..50: mol_type = other DNA
cgcgtggcggatggagtgcttgccggcagaaggagtccacgagcgccgag

SEQ ID NO: 60962 - DNA, 50 bp, synthetic construct
  source 1..50: mol_type = other DNA
gcgctcgaaggttcgcttccgggaggcgtacgaggaaggcattcgagagc

SEQ ID NO: 60963 - DNA, 50 bp, synthetic construct
  source 1..50: mol_type = other DNA
taaaaggtctaatgggtccaatggtagcattggacccatttttcctaaga

SEQ ID NO: 60964 - DNA, 50 bp, synthetic construct
  source 1..50: mol_type = other DNA
ggtaacaggacatcagtgttacatgtaagtaacactgagaagtacctacc

SEQ ID NO: 60965 - DNA, 50 bp, synthetic construct
  source 1..50: mol_type = other DNA
aggacaacgcctagaaatcttgatacgtcaccaatgctaacagtaacgct

SEQ ID NO: 60966 - DNA, 50 bp, synthetic construct
  source 1..50: mol_type = other DNA
cataagaggccatgtggcctcttttttagcgtagttcttcaacgggataa

SEQ ID NO: 60967 - DNA, 50 bp, synthetic construct
  source 1..50: mol_type = other DNA
ttaagttattgagatttaatgaaataaccttgttataatcaaccacttag

SEQ ID NO: 60968 - DNA, 50 bp, synthetic construct
  source 1..50: mol_type = other DNA
actttatggcacatgagcatcatggttcatttactgatgtgcgataaaga

SEQ ID NO: 60969 - DNA, 50 bp, synthetic construct
  source 1..50: mol_type = other DNA
gaattgaagtctgccctgtccgctattgaataaatcccttgcttctatat

SEQ ID NO: 60970 - DNA, 50 bp, synthetic construct
  source 1..50: mol_type = other DNA
aaccgagacgcagaggcgtatcataaatgatgcggttttttcagccgctt

SEQ ID NO: 60971 - DNA, 50 bp, synthetic construct
  source 1..50: mol_type = other DNA
aaaaatgcaactctggcttttatgaaacactaagggtataggtctttttt

SEQ ID NO: 60972 - DNA, 50 bp, synthetic construct
  source 1..50: mol_type = other DNA
gtcagttgcgagacacattccacgtgtgcggtctgtaactggcaacacaa

SEQ ID NO: 60973 - DNA, 50 bp, synthetic construct
  source 1..50: mol_type = other DNA
gtagtgagtcgagtacacaagaagaaactgttatgaacacaactaactac

SEQ ID NO: 60974 - DNA, 50 bp, synthetic construct
  source 1..50: mol_type = other DNA
aattgcaatctaaatctcctgagcataacatttttcttttcatttcaatt

SEQ ID NO: 60975 - DNA, 50 bp, synthetic construct
  source 1..50: mol_type = other DNA
aatatttatgttgttgttccagattcatctacaacagcttttccatcttc

SEQ ID NO: 60976 - DNA, 50 bp, synthetic construct
  source 1..50: mol_type = other DNA
aagtatgctcaacggacattaactttggtatattattaatgaccatacca

SEQ ID NO: 60977 - DNA, 50 bp, synthetic construct
  source 1..50: mol_type = other DNA
taatattttcgttctgaagcttattaacgatattcataacgaaactatca

SEQ ID NO: 60978 - DNA, 50 bp, synthetic construct
  source 1..50: mol_type = other DNA
aaagtgaggattcatcattatgtccagacaacattttttatctcctctcc

SEQ ID NO: 60979 - DNA, 50 bp, synthetic construct
  source 1..50: mol_type = other DNA
cttcaatcttcatataatgtcaccatttactctcaaatttaaagttgcag

SEQ ID NO: 60980 - DNA, 50 bp, synthetic construct
  source 1..50: mol_type = other DNA
tacgtgataatgtatcccataagcaggatattatgaaacattatcacgta

SEQ ID NO: 60981 - DNA, 50 bp, synthetic construct
  source 1..50: mol_type = other DNA
ttgtggaaaggtttgcgatgatttgacattgaaaatatgtggttccacaa

SEQ ID NO: 60982 - DNA, 50 bp, synthetic construct
  source 1..50: mol_type = other DNA
ctatggatatagaattgaaaacggtaatctttttaattgttgcacctttg

SEQ ID NO: 60983 - DNA, 50 bp, synthetic construct
  source 1..50: mol_type = other DNA
acaaattagtttattagtatttacaactacgatgatttagacttaaggct

SEQ ID NO: 60984 - DNA, 50 bp, synthetic construct
  source 1..50: mol_type = other DNA
tttagtttctcgattcgtctccgtccagagagagaaattgaggtactaaa

SEQ ID NO: 60985 - DNA, 50 bp, synthetic construct
  source 1..50: mol_type = other DNA
cgctacctagaccatgtcaattgttttcagttattttttatatcctagcc

SEQ ID NO: 60986 - DNA, 50 bp, synthetic construct
  source 1..50: mol_type = other DNA
agtctgtgttccgatactaaagccgactattgtgttgctacaacgagcaa

SEQ ID NO: 60987 - DNA, 50 bp, synthetic construct
  source 1..50: mol_type = other DNA
caaattgtcgatggaatgttcgctgaacgaatcaagccatctttgatgac

SEQ ID NO: 60988 - DNA, 50 bp, synthetic construct
  source 1..50: mol_type = other DNA
ataccattcagaacggtagggctgtacaaaatataccactttaatattat

SEQ ID NO: 60989 - DNA, 50 bp, synthetic construct
  source 1..50: mol_type = other DNA
tttttttataaaaaccgcatcatttacgtgatgcggttttatatttattg

SEQ ID NO: 60990 - DNA, 50 bp, synthetic construct
  source 1..50: mol_type = other DNA
cttttattcctcgctttctatcagacaacatagatatattcctcaaaatg

SEQ ID NO: 60991 - DNA, 50 bp, synthetic construct
  source 1..50: mol_type = other DNA
atctttttcaacttttcacctccttgatgtatgaaaatcgtgaaaatatc

SEQ ID NO: 60992 - DNA, 50 bp, synthetic construct
  source 1..50: mol_type = other DNA
ttgtttgtataagcataacacatttgagtgtgtgacgcttattacaacat

SEQ ID NO: 60993 - DNA, 50 bp, synthetic construct
  source 1..50: mol_type = other DNA
gatggtacccgcgtttttaagagcgcgcgctgaaaggtgatggttaaatc

SEQ ID NO: 60994 - DNA, 50 bp, synthetic construct
  source 1..50: mol_type = other DNA
agataatcttggtaatataataaatatgcccaaaattaataaggaggcat

SEQ ID NO: 60995 - DNA, 50 bp, synthetic construct
  source 1..50: mol_type = other DNA
tcacttaatataaaaagagagaggtttgtttgtattttgacactaccttg

SEQ ID NO: 60996 - DNA, 50 bp, synthetic construct
  source 1..50: mol_type = other DNA
tgaatggctataaaataaggcttcaggaaagtaaatggtagagttgttga

SEQ ID NO: 60997 - DNA, 50 bp, synthetic construct
  source 1..50: mol_type = other DNA
tgtgcatatccacatgaatgtcgctggcgggaggcaacaagagtggcacc

SEQ ID NO: 60998 - DNA, 50 bp, synthetic construct
  source 1..50: mol_type = other DNA
aaactgcttaccgctaattgctttgtcaagctgtttgcggtaagcagttt

SEQ ID NO: 60999 - DNA, 50 bp, synthetic construct
  source 1..50: mol_type = other DNA
cacatagactcgacattatccagagtaagggagatgattggacatatctg

SEQ ID NO: 61000 - DNA, 50 bp, synthetic construct
  source 1..50: mol_type = other DNA
gatcttggacaacaaacgtttgtgaaagcaaacgtttatttgtcgtcatc

SEQ ID NO: 61001 - DNA, 50 bp, synthetic construct
  source 1..50: mol_type = other DNA
aagcgccgcctgcatcatttttcgtgcccagtacgatccaggcagcgcct

SEQ ID NO: 61002 - DNA, 50 bp, synthetic construct
  source 1..50: mol_type = other DNA
ttgaatattatcgagttaaacttaattatgattcacaatttgtaattcaa

SEQ ID NO: 61003 - DNA, 50 bp, synthetic construct
  source 1..50: mol_type = other DNA
tataggaatggtatctctagggtgtccaacctatggcctggattcctccc

SEQ ID NO: 61004 - DNA, 50 bp, synthetic construct
  source 1..50: mol_type = other DNA
gtgccgcggttctcgtggctggcggccgccggcagggaggaccgcgaatg

SEQ ID NO: 61005 - DNA, 50 bp, synthetic construct
  source 1..50: mol_type = other DNA
ataaaaaaaggagacaactatttatttgttttcgagtgacctcagcggtg

SEQ ID NO: 61006 - DNA, 50 bp, synthetic construct
  source 1..50: mol_type = other DNA
tattgaaaaacaaactgggattaaatttatttttttttatattcttcatc

SEQ ID NO: 61007 - DNA, 50 bp, synthetic construct
  source 1..50: mol_type = other DNA
aagagtaacaatcctatcccgtcaaaatgcgtgttaggattattgaacct

SEQ ID NO: 61008 - DNA, 50 bp, synthetic construct
  source 1..50: mol_type = other DNA
tacagatttttcattttaaataataaggaatttaaaaagaaaaaagtaat

SEQ ID NO: 61009 - DNA, 50 bp, synthetic construct
  source 1..50: mol_type = other DNA
cgcgattgtgacttgcccaccatcagcaggttgggtaagtcacaatcaat

SEQ ID NO: 61010 - DNA, 50 bp, synthetic construct
  source 1..50: mol_type = other DNA
ctatttaatagttgtctcattaagtagacaattcgaatcattttattgaa

SEQ ID NO: 61011 - DNA, 50 bp, synthetic construct
  source 1..50: mol_type = other DNA
cgtgtctaataaaaatcacccgattataagggttttgtgtatttgaagat

SEQ ID NO: 61012 - DNA, 50 bp, synthetic construct
  source 1..50: mol_type = other DNA
atatttctttccagttagttttgcatttaggtctggctttaaacgtagaa

SEQ ID NO: 61013 - DNA, 50 bp, synthetic construct
  source 1..50: mol_type = other DNA
attcactttttcttacacattcctagtttgacggcggtgaaaaagagcat

SEQ ID NO: 61014 - DNA, 50 bp, synthetic construct
  source 1..50: mol_type = other DNA
gaaagtggaattttaaactatcaagctataccattaaaaacgacactggt

SEQ ID NO: 61015 - DNA, 50 bp, synthetic construct
  source 1..50: mol_type = other DNA
tggggttatttaagacacgatagcagcaccttgtatctggaatcacccca

SEQ ID NO: 61016 - DNA, 50 bp, synthetic construct
  source 1..50: mol_type = other DNA
atcgagctgtatagatataaataatataggttatagcattacaggctgat

SEQ ID NO: 61017 - DNA, 50 bp, synthetic construct
  source 1..50: mol_type = other DNA
cgctgagatagtgcattgtaatgaacagattatgatgcacttcataattt

SEQ ID NO: 61018 - DNA, 50 bp, synthetic construct
  source 1..50: mol_type = other DNA
aaatagttatgtcattaagaaaacttgtataggttatgacataactttag

SEQ ID NO: 61019 - DNA, 50 bp, synthetic construct
  source 1..50: mol_type = other DNA
ctacgtctattcgtcttttcgtcagacgatgatatgtcaaatggacgtaa

SEQ ID NO: 61020 - DNA, 50 bp, synthetic construct
  source 1..50: mol_type = other DNA
gtcagtcaaatgtatgttttttcaggttaaagcttttacattggtggaaa

SEQ ID NO: 61021 - DNA, 50 bp, synthetic construct
  source 1..50: mol_type = other DNA
actgttttatcctttgttacctcaattctagtctcaaaaatcaatagtgt

SEQ ID NO: 61022 - DNA, 50 bp, synthetic construct
  source 1..50: mol_type = other DNA
attctacagaagggacttccttttttgaatactatgtccttctaaagctt

SEQ ID NO: 61023 - DNA, 50 bp, synthetic construct
  source 1..50: mol_type = other DNA
gtttttaaattcgatccattcgtttaaatcaatagatagagccgaaaaaa

SEQ ID NO: 61024 - DNA, 50 bp, synthetic construct
  source 1..50: mol_type = other DNA
aagttttcctaatatcattcactcataaataatgatatttttttaaagac

SEQ ID NO: 61025 - DNA, 50 bp, synthetic construct
  source 1..50: mol_type = other DNA
tgctttataaaatatcattcactcataaataatgatatttttttaaagac

SEQ ID NO: 61026 - DNA, 50 bp, synthetic construct
  source 1..50: mol_type = other DNA
tgtaaaaagattaaaactgcgctccggagcgtgtttttactttcttgttt

SEQ ID NO: 61027 - DNA, 50 bp, synthetic construct
  source 1..50: mol_type = other DNA
tgtttatggggataataagatttttaaatttctgattatcttttcataag

SEQ ID NO: 61028 - DNA, 50 bp, synthetic construct
  source 1..50: mol_type = other DNA
aaaatgtgttccgatagtagtaacgagacggtagcgttattgtccaaact

SEQ ID NO: 61029 - DNA, 50 bp, synthetic construct
  source 1..50: mol_type = other DNA
taatatccttttgtttgggaaactccggtttcccttagttaaaaatatta

SEQ ID NO: 61030 - DNA, 50 bp, synthetic construct
  source 1..50: mol_type = other DNA
gatttagtggcttgtttttttacgttataaataaaaagtaacctgttttt

SEQ ID NO: 61031 - DNA, 50 bp, synthetic construct
  source 1..50: mol_type = other DNA
cagttcaattggttacactggacagacgctcaacgtaaccaatcacacaa

SEQ ID NO: 61032 - DNA, 50 bp, synthetic construct
  source 1..50: mol_type = other DNA
aactaaagcgtattggtctgaagattctaagccaccaataccaggcatat

SEQ ID NO: 61033 - DNA, 50 bp, synthetic construct
  source 1..50: mol_type = other DNA
cccacacaatccagacggtatctggccagctttgccatggatgacgtgct

SEQ ID NO: 61034 - DNA, 50 bp, synthetic construct
  source 1..50: mol_type = other DNA
tttgagtagcgttcgagaaggccgaccggtctactagaaccgctgaccgt

SEQ ID NO: 61035 - DNA, 50 bp, synthetic construct
  source 1..50: mol_type = other DNA
catttatttttcctccaatatatgataatctatttcatttaaaagtaagt

SEQ ID NO: 61036 - DNA, 50 bp, synthetic construct
  source 1..50: mol_type = other DNA
cctatgaatcagtgcatttccacacttggggaccttagctgatggtctgg

SEQ ID NO: 61037 - DNA, 50 bp, synthetic construct
  source 1..50: mol_type = other DNA
tgcaattttcatgattttaatattgaaatacgcatctcaaaaaaattaca

SEQ ID NO: 61038 - DNA, 50 bp, synthetic construct
  source 1..50: mol_type = other DNA
tcatggttctgcttgttggcgctgcaaaccagcaacctcgaaaagactct

SEQ ID NO: 61039 - DNA, 50 bp, synthetic construct
  source 1..50: mol_type = other DNA
tttgcccgcaccgcgcgcatcagggccctctactgcgccggattggctat

SEQ ID NO: 61040 - DNA, 50 bp, synthetic construct
  source 1..50: mol_type = other DNA
aaagggtctttaagagacaaccttagcaggttattttcaaaagacccagt

SEQ ID NO: 61041 - DNA, 50 bp, synthetic construct
  source 1..50: mol_type = other DNA
aatcataacattgcatacttcaccccgaaagagtcggcaatgtggggatg

SEQ ID NO: 61042 - DNA, 50 bp, synthetic construct
  source 1..50: mol_type = other DNA
ctttcctttattaaaagtctttagttctatttacaccaaattccggacag

SEQ ID NO: 61043 - DNA, 50 bp, synthetic construct
  source 1..50: mol_type = other DNA
gaatctttgattgataacctatacattcacaagttatcaaccaagaatta

SEQ ID NO: 61044 - DNA, 50 bp, synthetic construct
  source 1..50: mol_type = other DNA
aaccatttttctggattatggaaaaagttccagaatgatctaaaaggagc

SEQ ID NO: 61045 - DNA, 50 bp, synthetic construct
  source 1..50: mol_type = other DNA
aaagcaatagaaaagtagatagccagggcattcaatgagtgccttgccca

SEQ ID NO: 61046 - DNA, 50 bp, synthetic construct
  source 1..50: mol_type = other DNA
ggagccgggccgtcggggggtgcttcgcatgatccagaccgcccggcgtt

SEQ ID NO: 61047 - DNA, 50 bp, synthetic construct
  source 1..50: mol_type = other DNA
tggtcagggcgtttacacaccgggtacccggcatgtatacaggggtaccg

SEQ ID NO: 61048 - DNA, 50 bp, synthetic construct
  source 1..50: mol_type = other DNA
agacgggccttgccgacatgaccgatcggggatgagggtggttgccatga

SEQ ID NO: 61049 - DNA, 50 bp, synthetic construct
  source 1..50: mol_type = other DNA
acacattacaacagacttttttcataataaacattaaaaaagcaatccat

SEQ ID NO: 61050 - DNA, 50 bp, synthetic construct
  source 1..50: mol_type = other DNA
tatgcaatcgtggttaaaggaagtatcaatttctcaacgaaaaaagcagg

SEQ ID NO: 61051 - DNA, 50 bp, synthetic construct
  source 1..50: mol_type = other DNA
atgattttattcgcttaaatcaaaaatctgatagccgaaaaggaaatacc

SEQ ID NO: 61052 - DNA, 50 bp, synthetic construct
  source 1..50: mol_type = other DNA
ttggtctgccgtgagcagccacgggaccgtggctgcgaagttgcctgcaa

SEQ ID NO: 61053 - DNA, 50 bp, synthetic construct
  source 1..50: mol_type = other DNA
atagaaaaatatatcaacaaaaatttattttttttaatctttctgaaaca

SEQ ID NO: 61054 - DNA, 50 bp, synthetic construct
  source 1..50: mol_type = other DNA
aagattggcgtgtcgacatgggttcgagtccggcacgaagaaaggagaaa

SEQ ID NO: 61055 - DNA, 50 bp, synthetic construct
  source 1..50: mol_type = other DNA
gaggtatggcggatgttgcagccttcaaggtgctgggatcggagatgaaa

SEQ ID NO: 61056 - DNA, 50 bp, synthetic construct
  source 1..50: mol_type = other DNA
atattacagcattcatgttcctaatattttgaaaattaatgcttgacatt

SEQ ID NO: 61057 - DNA, 50 bp, synthetic construct
  source 1..50: mol_type = other DNA
gccagacacgctcacgatggttacgaggtcgaccggtgagcgagtcgagg

SEQ ID NO: 61058 - DNA, 50 bp, synthetic construct
  source 1..50: mol_type = other DNA
cgtcaattaattgcctacaatatactgatggtgtggctaattaaacggcg

SEQ ID NO: 61059 - DNA, 50 bp, synthetic construct
  source 1..50: mol_type = other DNA
acagcaggccgaccggctcggcgttgacgcggggtggagcagcccggtag

SEQ ID NO: 61060 - DNA, 50 bp, synthetic construct
  source 1..50: mol_type = other DNA
tatcaaataagagtgttccggatcaatatgtaggataagtatatttatcg

SEQ ID NO: 61061 - DNA, 50 bp, synthetic construct
  source 1..50: mol_type = other DNA
aaatttttcataaagtatctatctacttatttctctttttatattgttgg

SEQ ID NO: 61062 - DNA, 50 bp, synthetic construct
  source 1..50: mol_type = other DNA
tgggcatgagaggaactcctttcggtcaatcgatcgacctctgtttgaag

SEQ ID NO: 61063 - DNA, 50 bp, synthetic construct
  source 1..50: mol_type = other DNA
cagccagcgcagcagtctaatcatcaacgagccaaagtctgcgcttgcgc

SEQ ID NO: 61064 - DNA, 50 bp, synthetic construct
  source 1..50: mol_type = other DNA
cctgggccctgaggcgctcgtggaatgcagatagcgtgtcagagcccgtc

SEQ ID NO: 61065 - DNA, 50 bp, synthetic construct
  source 1..50: mol_type = other DNA
gttcggcgttcagagttctgttctgaagatgacaactacgtttactctat

SEQ ID NO: 61066 - DNA, 50 bp, synthetic construct
  source 1..50: mol_type = other DNA
agtatagagatcgtttcctaggggcaccctaaggaaataaaccctacact

SEQ ID NO: 61067 - DNA, 50 bp, synthetic construct
  source 1..50: mol_type = other DNA
cactttgcgtgatcgacgaacagccggggccacatagttcgagcaaatgg

SEQ ID NO: 61068 - DNA, 50 bp, synthetic construct
  source 1..50: mol_type = other DNA
cccgatcttctcatgcatcatgaccggcaatggtggagaagtcgaccggg

SEQ ID NO: 61069 - DNA, 50 bp, synthetic construct
  source 1..50: mol_type = other DNA
acactatcaatcagcgatttaatagcttttacattggtggaaatgtaggt

SEQ ID NO: 61070 - DNA, 50 bp, synthetic construct
  source 1..50: mol_type = other DNA
tataaattggaggatttaaggtcgaaagaatacaataaaaccgcaagcct

SEQ ID NO: 61071 - DNA, 50 bp, synthetic construct
  source 1..50: mol_type = other DNA
agtttggacaaaagtgctaccgtctcaacttgttcatcattgtccaaacc

SEQ ID NO: 61072 - DNA, 50 bp, synthetic construct
  source 1..50: mol_type = other DNA
agtataggtatagtatccctcgggtgcccgtgggttagggtaaataaacc

SEQ ID NO: 61073 - DNA, 50 bp, synthetic construct
  source 1..50: mol_type = other DNA
gataggggcatagtcggtgaagtattgcgattaccgatcatggtccggac

SEQ ID NO: 61074 - DNA, 50 bp, synthetic construct
  source 1..50: mol_type = other DNA
tttcccctctgcagaatttcttcatttgatacatttcggcaaaaaggata

SEQ ID NO: 61075 - DNA, 50 bp, synthetic construct
  source 1..50: mol_type = other DNA
ccaagcggcgcagggttgcgggttatggcttgccataatgcgaaacttgc

SEQ ID NO: 61076 - DNA, 50 bp, synthetic construct
  source 1..50: mol_type = other DNA
cttttttatgcgttgcttccgcagatcttgtaaagattcgtattcgatat

SEQ ID NO: 61077 - DNA, 50 bp, synthetic construct
  source 1..50: mol_type = other DNA
cactgtgattttctcaatctgctgtgcggataattcgcaaaataacagta

SEQ ID NO: 61078 - DNA, 50 bp, synthetic construct
  source 1..50: mol_type = other DNA
gaaccaaaaaaggataacagtccggccactctgcgtttcttttttgagtt

SEQ ID NO: 61079 - DNA, 50 bp, synthetic construct
  source 1..50: mol_type = other DNA
gctattaaaaatatagtgaagaatttaatcttgagagtatccttaatagc

SEQ ID NO: 61080 - DNA, 50 bp, synthetic construct
  source 1..50: mol_type = other DNA
tttcacaattactcgtaagcaccttaaggtgcttacgcaaaaaggctctc

SEQ ID NO: 61081 - DNA, 50 bp, synthetic construct
  source 1..50: mol_type = other DNA
acaacaagttgtatttcaaaccacattcagtcacttaaatttcaagttct

SEQ ID NO: 61082 - DNA, 50 bp, synthetic construct
  source 1..50: mol_type = other DNA
tgttcgacagccgcccggggccgccgccggcaccggcgtcgcgccgaacg

SEQ ID NO: 61083 - DNA, 50 bp, synthetic construct
  source 1..50: mol_type = other DNA
ttagaagtgttggagaaatggcataagataaatttcttgatgaattctat

SEQ ID NO: 61084 - DNA, 50 bp, synthetic construct
  source 1..50: mol_type = other DNA
gcataattttattcctgtaaactttatgattaacaggaatactgatatag

SEQ ID NO: 61085 - DNA, 50 bp, synthetic construct
  source 1..50: mol_type = other DNA
ttttcaaagattttctcgtgatatttatatcatcttcaatattttcttgg

SEQ ID NO: 61086 - DNA, 50 bp, synthetic construct
  source 1..50: mol_type = other DNA
ccacatgctttcagggttcgtatttatgtacgaacccctgaagaaggtga

SEQ ID NO: 61087 - DNA, 50 bp, synthetic construct
  source 1..50: mol_type = other DNA
gattgctgaaattggcgaatgaaacgtttaaaacgcccattctatgtcga

SEQ ID NO: 61088 - DNA, 50 bp, synthetic construct
  source 1..50: mol_type = other DNA
tgatcgatttatgctggaagtgtgatgctactggcggcataaaacgaatg

SEQ ID NO: 61089 - DNA, 50 bp, synthetic construct
  source 1..50: mol_type = other DNA
tatagacttccgttctccagcggctcgccgctttcgaacggtaggtgata

SEQ ID NO: 61090 - DNA, 50 bp, synthetic construct
  source 1..50: mol_type = other DNA
gaatgggtggattgtgccagaatgtgcactcaatacctgaacagcttttt

SEQ ID NO: 61091 - DNA, 50 bp, synthetic construct
  source 1..50: mol_type = other DNA
gcgccgtcctccgccgccacaggcgcgcccttcgggggggcggacggcca

SEQ ID NO: 61092 - DNA, 50 bp, synthetic construct
  source 1..50: mol_type = other DNA
aaccttaccgagaaagatgaaattcagcaaccatttttgatggtagcatt

SEQ ID NO: 61093 - DNA, 50 bp, synthetic construct
  source 1..50: mol_type = other DNA
cagtgttacttacgaaaagcttgctcccaacaatatcgtatgtaacactg

SEQ ID NO: 61094 - DNA, 50 bp, synthetic construct
  source 1..50: mol_type = other DNA
accgctcccgatacaccgacggtggctttcgtatgtgacaatccagcttc

SEQ ID NO: 61095 - DNA, 50 bp, synthetic construct
  source 1..50: mol_type = other DNA
aagatttgaatataggtttggacaattgtccaaacttaatgtcgataagc

SEQ ID NO: 61096 - DNA, 50 bp, synthetic construct
  source 1..50: mol_type = other DNA
cagaatggatcatgctggaaaataaatagcttttagagtgatgtatgtaa

SEQ ID NO: 61097 - DNA, 50 bp, synthetic construct
  source 1..50: mol_type = other DNA
agttgcacttttttagctatagtagatgctctatgtataaaagtgcaaca

SEQ ID NO: 61098 - DNA, 50 bp, synthetic construct
  source 1..50: mol_type = other DNA
aaacatccttaccaaacccttacattagcaaggctttgataaggatggta

SEQ ID NO: 61099 - DNA, 50 bp, synthetic construct
  source 1..50: mol_type = other DNA
gtttgcgactacttgtgatacggttcaccgtcaacagtcaattcgcaaaa

SEQ ID NO: 61100 - DNA, 50 bp, synthetic construct
  source 1..50: mol_type = other DNA
caatatttttaactaagggaaaccggagtttcccaaacaaaaggatatta

SEQ ID NO: 61101 - DNA, 50 bp, synthetic construct
  source 1..50: mol_type = other DNA
ggtttatgtcgtactcaatcaataattattgtttaagtacaacaaaaaga

SEQ ID NO: 61102 - DNA, 50 bp, synthetic construct
  source 1..50: mol_type = other DNA
aaaatgtgttccgatagtagtaacgagacggtagcattattgtccaaact

SEQ ID NO: 61103 - DNA, 50 bp, synthetic construct
  source 1..50: mol_type = other DNA
tttttatttcacctcaaataacattaaagtagatttcaatgaaataatgg

SEQ ID NO: 61104 - DNA, 50 bp, synthetic construct
  source 1..50: mol_type = other DNA
tgtgttccgataatagtgccgacacatatagagacttgtgtgttgctaca

SEQ ID NO: 61105 - DNA, 50 bp, synthetic construct
  source 1..50: mol_type = other DNA
aaatatttacaaaaaaacctcacttaaatgaggttttggatagaattgga

SEQ ID NO: 61106 - DNA, 50 bp, synthetic construct
  source 1..50: mol_type = other DNA
ataaagctcttatatataataatatagacaattttgactaagagattttt

SEQ ID NO: 61107 - DNA, 50 bp, synthetic construct
  source 1..50: mol_type = other DNA
ggtggattttctaagttttgaaaggaatatcagaacttaaagaaaaattt

SEQ ID NO: 61108 - DNA, 50 bp, synthetic construct
  source 1..50: mol_type = other DNA
tttcgacgtagcaacgccacagtctcatctttagcatgtgaacactcctt

SEQ ID NO: 61109 - DNA, 50 bp, synthetic construct
  source 1..50: mol_type = other DNA
cctcctagagtttagtttatttgaattctaataaaatagaaggaagtaca

SEQ ID NO: 61110 - DNA, 50 bp, synthetic construct
  source 1..50: mol_type = other DNA
aaatataaagccccgaaaagggacttagtaattgatttagcttctaaacc

SEQ ID NO: 61111 - DNA, 50 bp, synthetic construct
  source 1..50: mol_type = other DNA
aaagttttaaaaataaaagtagagactattgattaattttttaatatatt

SEQ ID NO: 61112 - DNA, 50 bp, synthetic construct
  source 1..50: mol_type = other DNA
ggcctccttattatttgttattatacgaaagaacaaattgaaaatacacc

SEQ ID NO: 61113 - DNA, 50 bp, synthetic construct
  source 1..50: mol_type = other DNA
cgggcaagggttctcaaactccctacgcacaaggctcgaacccttgccaa

SEQ ID NO: 61114 - DNA, 50 bp, synthetic construct
  source 1..50: mol_type = other DNA
gttgtgtacaggttgatgttccacgagttggacaacaacctccacaaaac

SEQ ID NO: 61115 - DNA, 50 bp, synthetic construct
  source 1..50: mol_type = other DNA
tggttgcggagtgtatagtagtggtcgtacttatatctactccgaagtgc

SEQ ID NO: 61116 - DNA, 50 bp, synthetic construct
  source 1..50: mol_type = other DNA
atggttgtaaacgatactcgtggaattccattatcaatttttacagccct

SEQ ID NO: 61117 - DNA, 50 bp, synthetic construct
  source 1..50: mol_type = other DNA
ctttcccacgcttccagctttgacgaaacagaacagaaagcggcttaaag

SEQ ID NO: 61118 - DNA, 50 bp, synthetic construct
  source 1..50: mol_type = other DNA
atttgcacgccgcgtgccgtcaccgatggtgcgccccgttgggtgcacgg

SEQ ID NO: 61119 - DNA, 50 bp, synthetic construct
  source 1..50: mol_type = other DNA
aaggcttaagtacgtccgccactgcaaagtgtcgctatttgaacaccgag

SEQ ID NO: 61120 - DNA, 50 bp, synthetic construct
  source 1..50: mol_type = other DNA
tatgagattgcttttggcatggggttaaccaacgagtaaccaatctcatc

SEQ ID NO: 61121 - DNA, 50 bp, synthetic construct
  source 1..50: mol_type = other DNA
ccccgattggaaccgggttcggattaaatccgaaccctcaacctccgcca

SEQ ID NO: 61122 - DNA, 50 bp, synthetic construct
  source 1..50: mol_type = other DNA
tattgattttaattagatacacaaatttgtgtgttaaattaataactcat

SEQ ID NO: 61123 - DNA, 50 bp, synthetic construct
  source 1..50: mol_type = other DNA
tgttgcattttagaacaccttgcatgtgcagtatgtacaaaaatgcaaca

SEQ ID NO: 61124 - DNA, 50 bp, synthetic construct
  source 1..50: mol_type = other DNA
cgttataacggacttttgtgttccgaatagagaagtaggaggataaaaaa

SEQ ID NO: 61125 - DNA, 50 bp, synthetic construct
  source 1..50: mol_type = other DNA
caaagaacttctacgcctgcaatccggttatcaggatggggatcggctta

SEQ ID NO: 61126 - DNA, 50 bp, synthetic construct
  source 1..50: mol_type = other DNA
ttgaagattcgtgtaataaattattttgcgattattaggtgaactgtttc

SEQ ID NO: 61127 - DNA, 50 bp, synthetic construct
  source 1..50: mol_type = other DNA
accaagagcataaataaacacaagcgcacgggcatatgattggtcttgaa

SEQ ID NO: 61128 - DNA, 50 bp, synthetic construct
  source 1..50: mol_type = other DNA
tatatgaaaggctaaaacagtttaatcacacaattacaaaaacggctgta

SEQ ID NO: 61129 - DNA, 50 bp, synthetic construct
  source 1..50: mol_type = other DNA
ttagtgtcactaggggttattcaagcttgagtatctggaataaccccaac

SEQ ID NO: 61130 - DNA, 50 bp, synthetic construct
  source 1..50: mol_type = other DNA
agatggcgacatataagcgttcacgctaatgaatttttcatttttcttct

SEQ ID NO: 61131 - DNA, 50 bp, synthetic construct
  source 1..50: mol_type = other DNA
cttcttaattaatttctattttatgtgcgtggtatccattaaaaaagaaa

SEQ ID NO: 61132 - DNA, 50 bp, synthetic construct
  source 1..50: mol_type = other DNA
gctctggagcggtctttccatcgttttcaatgtttcaacatgataataaa

SEQ ID NO: 61133 - DNA, 50 bp, synthetic construct
  source 1..50: mol_type = other DNA
cacctatcactattatattgaagcttttgtacagccaccctggaaaggtg

SEQ ID NO: 61134 - DNA, 50 bp, synthetic construct
  source 1..50: mol_type = other DNA
tacttttataaaccttagcggcgagttccgccgtaaagattactaaagtc

SEQ ID NO: 61135 - DNA, 50 bp, synthetic construct
  source 1..50: mol_type = other DNA
gcactatcgtaatttgaattatcaattatggcttcaaattcagcggtcaa

SEQ ID NO: 61136 - DNA, 50 bp, synthetic construct
  source 1..50: mol_type = other DNA
ttgcgggtatcgaccaccacgcactatggcgcttcaaacgatttgtcggc

SEQ ID NO: 61137 - DNA, 50 bp, synthetic construct
  source 1..50: mol_type = other DNA
ccgctggtcaggcgtacgcggtaaccgcttctgacctgcgaaaacgtgga

SEQ ID NO: 61138 - DNA, 50 bp, synthetic construct
  source 1..50: mol_type = other DNA
agctaccaaggtggtcggcaacccccggtcaaccaaccacctgggtagct

SEQ ID NO: 61139 - DNA, 50 bp, synthetic construct
  source 1..50: mol_type = other DNA
ttataaagcaaatcgtattgtataacaatgagatacgctgctttttacgg

SEQ ID NO: 61140 - DNA, 50 bp, synthetic construct
  source 1..50: mol_type = other DNA
taaacgcgattaaacggctttccgcgtcgaaagacaaaaaacaattcaaa

SEQ ID NO: 61141 - DNA, 50 bp, synthetic construct
  source 1..50: mol_type = other DNA
aaaataattaattatatacaatgacatcattgtaaggtattaagttttca

SEQ ID NO: 61142 - DNA, 50 bp, synthetic construct
  source 1..50: mol_type = other DNA
ccgccacggcatcgcggccggcggcatcctccccagcattgaaaccgcac

SEQ ID NO: 61143 - DNA, 50 bp, synthetic construct
  source 1..50: mol_type = other DNA
aggaaattaatccgccttaccatctggatcatgaggtggattaattaccc

SEQ ID NO: 61144 - DNA, 50 bp, synthetic construct
  source 1..50: mol_type = other DNA
gtctacaaggccgggttcgccaccagaagatcaagaccggccgggttgag

SEQ ID NO: 61145 - DNA, 50 bp, synthetic construct
  source 1..50: mol_type = other DNA
tataaccaaaattccagttaatttctgattttctaccaattttggttctc

SEQ ID NO: 61146 - DNA, 50 bp, synthetic construct
  source 1..50: mol_type = other DNA
gatgtagatcacggcccggcgagggccgggtcgagctcgtgaaaggcggc

SEQ ID NO: 61147 - DNA, 50 bp, synthetic construct
  source 1..50: mol_type = other DNA
cagcctgcgcaagggccagcatgaaggccgaatgaaccttgcgcataaag

SEQ ID NO: 61148 - DNA, 50 bp, synthetic construct
  source 1..50: mol_type = other DNA
aacagaaacttgccttcattaatggtaatacaacaaggatcgttgtagtt

SEQ ID NO: 61149 - DNA, 50 bp, synthetic construct
  source 1..50: mol_type = other DNA
attcaatacctaaaatgatgtgtttaggaaggagtgtttaacgggagaag

SEQ ID NO: 61150 - DNA, 50 bp, synthetic construct
  source 1..50: mol_type = other DNA
gtgataaactcccatgcaattgattaaaaaagttcatgtcttgaagtggt

SEQ ID NO: 61151 - DNA, 50 bp, synthetic construct
  source 1..50: mol_type = other DNA
gaatttgtttgtatcatttcctattctaagaaatatcgtcaaaaagacat

SEQ ID NO: 61152 - DNA, 50 bp, synthetic construct
  source 1..50: mol_type = other DNA
atgatttattagaaaaaaagaataatacgcactttacccaattaaatcac

SEQ ID NO: 61153 - DNA, 50 bp, synthetic construct
  source 1..50: mol_type = other DNA
cggcgttggatccaagttgctgttattgcgaaatcaaggattggacgatt

SEQ ID NO: 61154 - DNA, 50 bp, synthetic construct
  source 1..50: mol_type = other DNA
ttcataaggtaagatctcctttattaaacaatcatttccgcccttattag

SEQ ID NO: 61155 - DNA, 50 bp, synthetic construct
  source 1..50: mol_type = other DNA
tggctaatcttgctcctgaacaattaattgggtaaagtgaggattatccc

SEQ ID NO: 61156 - DNA, 50 bp, synthetic construct
  source 1..50: mol_type = other DNA
actatttcactctttgtatcaacgctgcgggagtcaaaaggtccagtgga

SEQ ID NO: 61157 - DNA, 50 bp, synthetic construct
  source 1..50: mol_type = other DNA
caaattgtcatcaaccctgaccaagcttggtaatggttaattaccacttc

SEQ ID NO: 61158 - DNA, 50 bp, synthetic construct
  source 1..50: mol_type = other DNA
agtttgcaatccctacacatcacatttgtgatgtgtagtttttgcaaaca

SEQ ID NO: 61159 - DNA, 50 bp, synthetic construct
  source 1..50: mol_type = other DNA
gatttcactctttgtatcaacgctattgaataggaacacaaagttttgac

SEQ ID NO: 61160 - DNA, 50 bp, synthetic construct
  source 1..50: mol_type = other DNA
tccaattctatccaaaacctcatttaagtgaggtttttttctattttagt

SEQ ID NO: 61161 - DNA, 50 bp, synthetic construct
  source 1..50: mol_type = other DNA
agttacagtttaaaaccaccacgagttccgggtggatttaaatagttatg

SEQ ID NO: 61162 - DNA, 50 bp, synthetic construct
  source 1..50: mol_type = other DNA
tggcgcacgctaccgccatcggggagcgcccatggcacaagcgtagcgat

SEQ ID NO: 61163 - DNA, 50 bp, synthetic construct
  source 1..50: mol_type = other DNA
tatttaaaagtaataactgctataataataacagttatagtttacttatt

SEQ ID NO: 61164 - DNA, 50 bp, synthetic construct
  source 1..50: mol_type = other DNA
tatcctcctagaatctaatatcaatataaggtttgctctctaggaggctt

SEQ ID NO: 61165 - DNA, 50 bp, synthetic construct
  source 1..50: mol_type = other DNA
agatggcgacatataagcgtttatgctaatgaatttttcatttttcttct

SEQ ID NO: 61166 - DNA, 50 bp, synthetic construct
  source 1..50: mol_type = other DNA
tagcaagtcattagtgactcaatcatgatgagagtataaatgtgtacgat

SEQ ID NO: 61167 - DNA, 50 bp, synthetic construct
  source 1..50: mol_type = other DNA
tttttcgtttctatcttgaatttaaatacggctaagctcgtgcgctaaac

SEQ ID NO: 61168 - DNA, 50 bp, synthetic construct
  source 1..50: mol_type = other DNA
gcttggcggttttcgcgctcttgcaatcaaggaggtgtaaaatgagtgcc

SEQ ID NO: 61169 - DNA, 50 bp, synthetic construct
  source 1..50: mol_type = other DNA
gctttctatttgactataaatgtattcattgatatcatcaaataatgctc

SEQ ID NO: 61170 - DNA, 50 bp, synthetic construct
  source 1..50: mol_type = other DNA
tgaagaaatcgccatagcccctaattttaacttgtttagcattttcttca

SEQ ID NO: 61171 - DNA, 50 bp, synthetic construct
  source 1..50: mol_type = other DNA
taaatagaaggaactggagggacaagtggttagaatttccattctatctc

SEQ ID NO: 61172 - DNA, 50 bp, synthetic construct
  source 1..50: mol_type = other DNA
ccagctgccgatcggcactgctgccggcagagacgaagcctcgagcgagg

SEQ ID NO: 61173 - DNA, 50 bp, synthetic construct
  source 1..50: mol_type = other DNA
gaagtattaagcgcgagtgtgcgaccctaagcataaacgtttaatacttc

SEQ ID NO: 61174 - DNA, 50 bp, synthetic construct
  source 1..50: mol_type = other DNA
tcatctccaaatccggcgccttgtcgaggagaatgaacatttgttgaagc

SEQ ID NO: 61175 - DNA, 50 bp, synthetic construct
  source 1..50: mol_type = other DNA
gcgcataaacatttctgagagcttcaaagaagtatgaaactcgataacgc

SEQ ID NO: 61176 - DNA, 50 bp, synthetic construct
  source 1..50: mol_type = other DNA
tcctttgctattaagtaacaatatcagtgttgtttcatatgttaaattta

SEQ ID NO: 61177 - DNA, 50 bp, synthetic construct
  source 1..50: mol_type = other DNA
ccagttgttcggattgatgctgcccagccagctcttacccgaacccaccc

SEQ ID NO: 61178 - DNA, 50 bp, synthetic construct
  source 1..50: mol_type = other DNA
ggtcgccgcgctgcgggccgggggcgccccgaacatcctccgcggcgacg

SEQ ID NO: 61179 - DNA, 50 bp, synthetic construct
  source 1..50: mol_type = other DNA
ccgactgccgccgagaggcgaagatattcctacgtccgcatgtcgaccga

SEQ ID NO: 61180 - DNA, 50 bp, synthetic construct
  source 1..50: mol_type = other DNA
tgtgttggattttccggtaacggatttcttttttaagaaaaggagcgaca

SEQ ID NO: 61181 - DNA, 50 bp, synthetic construct
  source 1..50: mol_type = other DNA
ttataattaatgtgtacatttatttagtaaagtaaccacgttatttattt

SEQ ID NO: 61182 - DNA, 50 bp, synthetic construct
  source 1..50: mol_type = other DNA
agaattctacgaatagcgccattcatgaagcgcctcattcgtagaaaagc

SEQ ID NO: 61183 - DNA, 50 bp, synthetic construct
  source 1..50: mol_type = other DNA
aaagtcgctcgataggagctggggcgcgccggggcatgtcgaggggcttg

SEQ ID NO: 61184 - DNA, 50 bp, synthetic construct
  source 1..50: mol_type = other DNA
ttatcttttgacattccggagacatatttctctatcttgtatattcctaa

SEQ ID NO: 61185 - DNA, 50 bp, synthetic construct
  source 1..50: mol_type = other DNA
agcctcaattcgttcgttgagggggcccagccaacgcgaccagacttgcc

SEQ ID NO: 61186 - DNA, 50 bp, synthetic construct
  source 1..50: mol_type = other DNA
tcaatatattatattcatacaaattattttgtatgtttagtgattttatt

SEQ ID NO: 61187 - DNA, 50 bp, synthetic construct
  source 1..50: mol_type = other DNA
acgaatacagtttagttttcataccatcataaattcacctctctattaag

SEQ ID NO: 61188 - DNA, 50 bp, synthetic construct
  source 1..50: mol_type = other DNA
tacggcatttcccccaagaactgcgagctgtttttgttggatgtaccgta

SEQ ID NO: 61189 - DNA, 50 bp, synthetic construct
  source 1..50: mol_type = other DNA
ttctctcttgtttgttaatcatggttttgagcataaaaaacagcctagaa

SEQ ID NO: 61190 - DNA, 50 bp, synthetic construct
  source 1..50: mol_type = other DNA
ccgctaacagtaaagccttagaaaaatttctaagaatttactgaaaagct

SEQ ID NO: 61191 - DNA, 50 bp, synthetic construct
  source 1..50: mol_type = other DNA
atgatactaattatcaagtgtgaaaattcacacatgataattaatatcat

SEQ ID NO: 61192 - DNA, 50 bp, synthetic construct
  source 1..50: mol_type = other DNA
acgttagggttccaacggtgtagcagttgtatttgttggaacccccggtg

SEQ ID NO: 61193 - DNA, 50 bp, synthetic construct
  source 1..50: mol_type = other DNA
taaaaaacaatatagaattcataattatatagattttgcattgtttatac

SEQ ID NO: 61194 - DNA, 50 bp, synthetic construct
  source 1..50: mol_type = other DNA
tatttggagggctggtcgatgattaaaaactcagaaagcccctgatgaat

SEQ ID NO: 61195 - DNA, 50 bp, synthetic construct
  source 1..50: mol_type = other DNA
cccgtctttaactccttccatatagagtacagcaaggagaaatggtaaaa

SEQ ID NO: 61196 - DNA, 50 bp, synthetic construct
  source 1..50: mol_type = other DNA
ttgcacttctattgcttctttatcacggtaaggaagcaagcaaccgaaaa

SEQ ID NO: 61197 - DNA, 50 bp, synthetic construct
  source 1..50: mol_type = other DNA
tggtatctttatctaagtgaacccccggtatcacatagttaaaaatattg

SEQ ID NO: 61198 - DNA, 50 bp, synthetic construct
  source 1..50: mol_type = other DNA
agccttgtatttacagtgttcctaattaggaaaacacactgtcaaaaggg

SEQ ID NO: 61199 - DNA, 50 bp, synthetic construct
  source 1..50: mol_type = other DNA
ttgaaacgcatcaatataatttactagttgtttatatactattaattcaa

SEQ ID NO: 61200 - DNA, 50 bp, synthetic construct
  source 1..50: mol_type = other DNA
ttgttgaggatttaaaaaaataaatttttttgctgctatatcatccacaa

SEQ ID NO: 61201 - DNA, 50 bp, synthetic construct
  source 1..50: mol_type = other DNA
ccttcgggtgtaaaacacgactgtcgacgtttgtcttttacacccctaat

SEQ ID NO: 61202 - DNA, 50 bp, synthetic construct
  source 1..50: mol_type = other DNA
ctcggagttgttgtctcatgtgtagctgcacacacaacaacaaagatcca

SEQ ID NO: 61203 - DNA, 50 bp, synthetic construct
  source 1..50: mol_type = other DNA
ctcaaggcgcgcgatgcgctcaagcggagcagcacgccgggcagaagcag

SEQ ID NO: 61204 - DNA, 50 bp, synthetic construct
  source 1..50: mol_type = other DNA
tgtggatggaaaaaataccatctgtggagattttatcgggaaagtcatgg

SEQ ID NO: 61205 - DNA, 50 bp, synthetic construct
  source 1..50: mol_type = other DNA
cctgccagtttatggtaagaataaaatgcatcttactattatccgaactg

SEQ ID NO: 61206 - DNA, 50 bp, synthetic construct
  source 1..50: mol_type = other DNA
ttgatgtggacgggaatttccgagatctcggaaatccgcaacgaagactt

SEQ ID NO: 61207 - DNA, 50 bp, synthetic construct
  source 1..50: mol_type = other DNA
aaacacataattaaaagtatgttagtgtttattctaacactatattggta

SEQ ID NO: 61208 - DNA, 50 bp, synthetic construct
  source 1..50: mol_type = other DNA
aaggacaattaaaaaaacctcatcatgatgcggttttttcagccgcttca

SEQ ID NO: 61209 - DNA, 50 bp, synthetic construct
  source 1..50: mol_type = other DNA
tatgcactccacatgccctgagtgcgacgcaccatcttgtgttgtcaata

SEQ ID NO: 61210 - DNA, 50 bp, synthetic construct
  source 1..50: mol_type = other DNA
tttagtacctcaatttctctcgctggacggagacgaatcgagaaactaaa

SEQ ID NO: 61211 - DNA, 50 bp, synthetic construct
  source 1..50: mol_type = other DNA
ctagatttagccgttttttacacttaataaaaaagacacactcgaaagtg

SEQ ID NO: 61212 - DNA, 50 bp, synthetic construct
  source 1..50: mol_type = other DNA
cattttctactaaaatcctcagtgatcacaggatggattagtataattta

SEQ ID NO: 61213 - DNA, 50 bp, synthetic construct
  source 1..50: mol_type = other DNA
tatctttaactatgtgataccggaaatggggtttcacttagataaagata

SEQ ID NO: 61214 - DNA, 50 bp, synthetic construct
  source 1..50: mol_type = other DNA
tgagtctatcactctcatagacagtgctgtcgtgtttcctgatcgccgcg

SEQ ID NO: 61215 - DNA, 50 bp, synthetic construct
  source 1..50: mol_type = other DNA
gcacgtgccgatcgtcagcgtccgcctggacgaggatcattagccgctgg

SEQ ID NO: 61216 - DNA, 50 bp, synthetic construct
  source 1..50: mol_type = other DNA
atgatttaacctatagtttaagactttatgtaaaatataggtataactat

SEQ ID NO: 61217 - DNA, 50 bp, synthetic construct
  source 1..50: mol_type = other DNA
cacccgcggatttgcgatcagcccgcgatgagatcgcgaaactctcggct

SEQ ID NO: 61218 - DNA, 50 bp, synthetic construct
  source 1..50: mol_type = other DNA
atgttcaggttcttggcgtcgatgcgcttcggcgaaccggtaccgaacta

SEQ ID NO: 61219 - DNA, 50 bp, synthetic construct
  source 1..50: mol_type = other DNA
aaccgaccgcgtccacaaagggcgagcctccgcagcattgtcggtgcctc

SEQ ID NO: 61220 - DNA, 50 bp, synthetic construct
  source 1..50: mol_type = other DNA
cgaggataaaaaattatgttcccaatacaaaagatataaatttagaaatc

SEQ ID NO: 61221 - DNA, 50 bp, synthetic construct
  source 1..50: mol_type = other DNA
aatagcacaatacaaaacttaacgttccttgtttattgtattatgctatt

SEQ ID NO: 61222 - DNA, 50 bp, synthetic construct
  source 1..50: mol_type = other DNA
gcacaggcgaaatgggacacgccgcggggcggttcacatagcccctgatt

SEQ ID NO: 61223 - DNA, 50 bp, synthetic construct
  source 1..50: mol_type = other DNA
tgatggttacaggtaaaataaaaaaattcacattcctgctgttagcatca

SEQ ID NO: 61224 - DNA, 50 bp, synthetic construct
  source 1..50: mol_type = other DNA
aaaatcaggaaggaagattccagaattctttaatctttaatcacctagcc

SEQ ID NO: 61225 - DNA, 50 bp, synthetic construct
  source 1..50: mol_type = other DNA
ctacctgtaccagcattattaagcacgcttaaccaatataaagcgggttc

SEQ ID NO: 61226 - DNA, 50 bp, synthetic construct
  source 1..50: mol_type = other DNA
tacttcttgctaataaactctttgtagcgcaattaaattaaaaaggggta

SEQ ID NO: 61227 - DNA, 50 bp, synthetic construct
  source 1..50: mol_type = other DNA
gtagtagcgatttagtatctcttatgttaaagctggtgatacgctactaa

SEQ ID NO: 61228 - DNA, 50 bp, synthetic construct
  source 1..50: mol_type = other DNA
gtatgcttttataaaccttagtggtgcggctcaggtattcaacagcaaac

SEQ ID NO: 61229 - DNA, 50 bp, synthetic construct
  source 1..50: mol_type = other DNA
tttgaaatattttataaatatatatttacataaaatcaaacattttaata

SEQ ID NO: 61230 - DNA, 50 bp, synthetic construct
  source 1..50: mol_type = other DNA
tgttgaatttttaaaaacctcatcatgatgcggttttttcagccgcttca

SEQ ID NO: 61231 - DNA, 50 bp, synthetic construct
  source 1..50: mol_type = other DNA
atttttaacaatatcgccaaatcgataatcttaaaaatattatatcaaaa

SEQ ID NO: 61232 - DNA, 50 bp, synthetic construct
  source 1..50: mol_type = other DNA
atttgatacactcctttcgctactataatcttaaaaatattatatcaaaa

SEQ ID NO: 61233 - DNA, 50 bp, synthetic construct
  source 1..50: mol_type = other DNA
atagatcattcgttcctttctaaaattttctcaataaaggtgtgatacaa

SEQ ID NO: 61234 - DNA, 50 bp, synthetic construct
  source 1..50: mol_type = other DNA
ttccattgaacgaacgttgcacaaaggtgtgatacaaagctttaacttgc

SEQ ID NO: 61235 - DNA, 50 bp, synthetic construct
  source 1..50: mol_type = other DNA
tcacacaccctatggatatagaattggccatgtgatactatcattgatga

SEQ ID NO: 61236 - DNA, 50 bp, synthetic construct
  source 1..50: mol_type = other DNA
gtaaaatattaacagtcaattaagagcttacgaactattaaataaaaatt

SEQ ID NO: 61237 - DNA, 50 bp, synthetic construct
  source 1..50: mol_type = other DNA
cacgtgtaagcagtcctacacactcgatatgcgttgactgtctacttagt

SEQ ID NO: 61238 - DNA, 50 bp, synthetic construct
  source 1..50: mol_type = other DNA
ctttgtatcaacgctatgcactccacgtgtgttgtcaataggataggaat

SEQ ID NO: 61239 - DNA, 50 bp, synthetic construct
  source 1..50: mol_type = other DNA
tgggtgaccatcagctgcattttcttgaaaatattacagatacgatacca

SEQ ID NO: 61240 - DNA, 50 bp, synthetic construct
  source 1..50: mol_type = other DNA
caagctgtcagcaaaactactccctctttcccatagtcactatctccttg

SEQ ID NO: 61241 - DNA, 50 bp, synthetic construct
  source 1..50: mol_type = other DNA
tttattattatggattagtatctcatgaggtactaaacaatctaaataaa

SEQ ID NO: 61242 - DNA, 50 bp, synthetic construct
  source 1..50: mol_type = other DNA
attggggttccttgaggaattccaaatacccctggtcacttaaccagagc

SEQ ID NO: 61243 - DNA, 50 bp, synthetic construct
  source 1..50: mol_type = other DNA
ttatttgtatcaatttcaaagtgattagacgttgtcggtgatacaatgtc

SEQ ID NO: 61244 - DNA, 50 bp, synthetic construct
  source 1..50: mol_type = other DNA
tttggtatctcgtttcttcttcttccagcgagagataacgaggtactaaa

SEQ ID NO: 61245 - DNA, 50 bp, synthetic construct
  source 1..50: mol_type = other DNA
ttatttagattatttagtacctcgtttccgctactttcttttctaaatct

SEQ ID NO: 61246 - DNA, 50 bp, synthetic construct
  source 1..50: mol_type = other DNA
tttagttcctcgttttctctcgttggaagaagaagaaacgagatacccaa

SEQ ID NO: 61247 - DNA, 50 bp, synthetic construct
  source 1..50: mol_type = other DNA
cgggtgtaaagcctgacattggtgtacgcgaaaagttgactttgatcgca

SEQ ID NO: 61248 - DNA, 50 bp, synthetic construct
  source 1..50: mol_type = other DNA
gtttagaaaataatagttcttcatcaattctgtcatgctattttttctcc

SEQ ID NO: 61249 - DNA, 50 bp, synthetic construct
  source 1..50: mol_type = other DNA
attattcctatttttttatcattcatgagccttgaaaagattaaaataga

SEQ ID NO: 61250 - DNA, 50 bp, synthetic construct
  source 1..50: mol_type = other DNA
tcatcgtatttcttttctataacgcccctagtagcaaacaaaaccgaaag

SEQ ID NO: 61251 - DNA, 50 bp, synthetic construct
  source 1..50: mol_type = other DNA
cttttaacccaataattccttgtaaaaccaagaacacaagtaactaatag

SEQ ID NO: 61252 - DNA, 50 bp, synthetic construct
  source 1..50: mol_type = other DNA
tatacatcactctaaaagcagtgtttctgctgagtttaacctgataaact

SEQ ID NO: 61253 - DNA, 50 bp, synthetic construct
  source 1..50: mol_type = other DNA
ggatgactgtctgacatggcgagggcctctctttttggagattctgatca

SEQ ID NO: 61254 - DNA, 50 bp, synthetic construct
  source 1..50: mol_type = other DNA
aatgagaaaataaataattcctgctatgtattactattttgatattcatt

SEQ ID NO: 61255 - DNA, 50 bp, synthetic construct
  source 1..50: mol_type = other DNA
tgaggctgcattttgctgcagaagtccttcttattcaaaattcataacta

SEQ ID NO: 61256 - DNA, 50 bp, synthetic construct
  source 1..50: mol_type = other DNA
ttcgatgggtgtataatattagggaatcctaagtgtgtcaacccattatt

SEQ ID NO: 61257 - DNA, 50 bp, synthetic construct
  source 1..50: mol_type = other DNA
aaaaataaaagttgaaaatatgggagtccaccatatcaatatttattttt

SEQ ID NO: 61258 - DNA, 50 bp, synthetic construct
  source 1..50: mol_type = other DNA
cataagaaaaaatgttagattcaggtcttaatctaacaattcggcatgac

SEQ ID NO: 61259 - DNA, 50 bp, synthetic construct
  source 1..50: mol_type = other DNA
atgatgagtaggggcggtattttatttaaaattgtattagggtttgccat

SEQ ID NO: 61260 - DNA, 50 bp, synthetic construct
  source 1..50: mol_type = other DNA
tttcaataaagcgatgatgaccaatattggcggtcagctcaatattctat

SEQ ID NO: 61261 - DNA, 50 bp, synthetic construct
  source 1..50: mol_type = other DNA
atggacgttatgctttgctaatatatatacaatgatagctatttatgcaa

SEQ ID NO: 61262 - DNA, 50 bp, synthetic construct
  source 1..50: mol_type = other DNA
gcagaagaagatattgatagatctaatgacttgataatatccccttttag

SEQ ID NO: 61263 - DNA, 50 bp, synthetic construct
  source 1..50: mol_type = other DNA
tttattaagaaacgttttagtgatgaggtaataaataatggctaaagtaa

SEQ ID NO: 61264 - DNA, 50 bp, synthetic construct
  source 1..50: mol_type = other DNA
ttgcattaccaccagtatttcccgaacggtgctcgtaatggggcgggcac

SEQ ID NO: 61265 - DNA, 50 bp, synthetic construct
  source 1..50: mol_type = other DNA
tgaaaaagccactccgaaaagtggctcaagtttccttttatcgaaccaac

SEQ ID NO: 61266 - DNA, 50 bp, synthetic construct
  source 1..50: mol_type = other DNA
gaatttcaaaagatgcttctttcatattagcggaggtgcttatgatggag

SEQ ID NO: 61267 - DNA, 50 bp, synthetic construct
  source 1..50: mol_type = other DNA
atattgctttcatatgagtcattctagagtgatgtatagtactgcgagaa

SEQ ID NO: 61268 - DNA, 50 bp, synthetic construct
  source 1..50: mol_type = other DNA
gtttataaaacaattaatgtgtaaatcgttacggtaattgagcttaaaag

SEQ ID NO: 61269 - DNA, 50 bp, synthetic construct
  source 1..50: mol_type = other DNA
tttaatagcattttcagccccggaattggaaataagcaacttctattata

SEQ ID NO: 61270 - DNA, 50 bp, synthetic construct
  source 1..50: mol_type = other DNA
ctcattatcattttcctcgctgttagtcatacgatgatttggataatgag

SEQ ID NO: 61271 - DNA, 50 bp, synthetic construct
  source 1..50: mol_type = other DNA
catcttcagggcgatgtcttgtagcgacgtgctgggcccccgcgaagacc

SEQ ID NO: 61272 - DNA, 50 bp, synthetic construct
  source 1..50: mol_type = other DNA
gccgcgatccggccttcttccgggggtcagcgagaaggcgtcttcgccgt

SEQ ID NO: 61273 - DNA, 50 bp, synthetic construct
  source 1..50: mol_type = other DNA
tttttgttaaaatgggtatagtaaaatttccatgtcctcttttgttacaa

SEQ ID NO: 61274 - DNA, 50 bp, synthetic construct
  source 1..50: mol_type = other DNA
aaatcatacattaaatgtagcaacatcatgaaaaatttattgttaaaatg

SEQ ID NO: 61275 - DNA, 50 bp, synthetic construct
  source 1..50: mol_type = other DNA
ccacagctccgccaatggcgcgtatcgccgcagttctggcggaggtgtgt

SEQ ID NO: 61276 - DNA, 50 bp, synthetic construct
  source 1..50: mol_type = other DNA
tcgacgatgatgttgcccttctgatgggtgaaatggcacacggagttcaa

SEQ ID NO: 61277 - DNA, 50 bp, synthetic construct
  source 1..50: mol_type = other DNA
accgagaaacgcgcgctgtactggatcggttaggacgacagattctcatt

SEQ ID NO: 61278 - DNA, 50 bp, synthetic construct
  source 1..50: mol_type = other DNA
ggacgggtccacagttcgcagatataaatctgcgaacacggataagtatt

SEQ ID NO: 61279 - DNA, 50 bp, synthetic construct
  source 1..50: mol_type = other DNA
cgttttttgcattctattttaccaaaatataaaattgaatgcagctaaca

SEQ ID NO: 61280 - DNA, 50 bp, synthetic construct
  source 1..50: mol_type = other DNA
agacaccgtctggaaaatcggaaaactttctcattttcgtttccctgtct

SEQ ID NO: 61281 - DNA, 50 bp, synthetic construct
  source 1..50: mol_type = other DNA
tatagcacatgctgccatctttttcatcaaagttttcatagcgactgata

SEQ ID NO: 61282 - DNA, 50 bp, synthetic construct
  source 1..50: mol_type = other DNA
gttaggtaaccaatatatggatactatcatccatttataggggagctttt

SEQ ID NO: 61283 - DNA, 50 bp, synthetic construct
  source 1..50: mol_type = other DNA
tcatataaaaatggctggatagatgattcttcaaatgcatgaatactgga

SEQ ID NO: 61284 - DNA, 50 bp, synthetic construct
  source 1..50: mol_type = other DNA
aatttttcaataaaaaaagaattaagagattctttgtctttccaaaaatt

SEQ ID NO: 61285 - DNA, 50 bp, synthetic construct
  source 1..50: mol_type = other DNA
caccccgatcagactgtagatgtattcacatttcaatactgatcgtcacg

SEQ ID NO: 61286 - DNA, 50 bp, synthetic construct
  source 1..50: mol_type = other DNA
atgatttatcaagcgttttcggtaatttctgaagctccctgatacgcttc

SEQ ID NO: 61287 - DNA, 50 bp, synthetic construct
  source 1..50: mol_type = other DNA
aactgataacgtactaaaaccttcaaacaaaaattagtaggtctccaatg

SEQ ID NO: 61288 - DNA, 50 bp, synthetic construct
  source 1..50: mol_type = other DNA
ttatggtaaagctaatagatgtacttcctcaatgattatgtttatcaaat

SEQ ID NO: 61289 - DNA, 50 bp, synthetic construct
  source 1..50: mol_type = other DNA
agtttaataaaaaaaagattaagggaccttaattgtctttttaaataaaa

SEQ ID NO: 61290 - DNA, 50 bp, synthetic construct
  source 1..50: mol_type = other DNA
gatgttgatgaggttatcatatagttttcaatgataagtccgtcatcatc

SEQ ID NO: 61291 - DNA, 50 bp, synthetic construct
  source 1..50: mol_type = other DNA
ttagttattaggggttgactacgttaatatcatgtacccacaataacacg

SEQ ID NO: 61292 - DNA, 50 bp, synthetic construct
  source 1..50: mol_type = other DNA
gacatgattgaatggattgattgaatcagcttgatccaagcaatcatgaa

SEQ ID NO: 61293 - DNA, 50 bp, synthetic construct
  source 1..50: mol_type = other DNA
cccgacatcaacaagctggggctgatctcaccgtgctttattgaattcat

SEQ ID NO: 61294 - DNA, 50 bp, synthetic construct
  source 1..50: mol_type = other DNA
gatgtagctgattgcccgtctcatatatgaatgagagatgcagaatttag

SEQ ID NO: 61295 - DNA, 50 bp, synthetic construct
  source 1..50: mol_type = other DNA
tttagtacctcgttatctctcgctggacggagaagaaacgagatgcaaaa

SEQ ID NO: 61296 - DNA, 50 bp, synthetic construct
  source 1..50: mol_type = other DNA
tttagtttctcgattcgtctccgtccaacgagaggaaacgaggaactaaa

SEQ ID NO: 61297 - DNA, 50 bp, synthetic construct
  source 1..50: mol_type = other DNA
gtcatcaaagatggcttgattcgttcagcgaacattccatcgacaatttg

SEQ ID NO: 61298 - DNA, 50 bp, synthetic construct
  source 1..50: mol_type = other DNA
ttctttcgtaaatgaattaatttttcaatttattttcagatgcgagttta

SEQ ID NO: 61299 - DNA, 50 bp, synthetic construct
  source 1..50: mol_type = other DNA
ttgcttttcgagtgtgtggttgactagctaacatgttactaccaaagaaa

SEQ ID NO: 61300 - DNA, 50 bp, synthetic construct
  source 1..50: mol_type = other DNA
gaataaggatgttctttttgttgacctcaagaaacgtgggaggaatattg

SEQ ID NO: 61301 - DNA, 50 bp, synthetic construct
  source 1..50: mol_type = other DNA
ataatggttcccaacagtggaatttcttctgttctttttctaaaaattac

SEQ ID NO: 61302 - DNA, 50 bp, synthetic construct
  source 1..50: mol_type = other DNA
tctatttttgttatctttttcatcatgattatcaaagtcataaaaataaa

SEQ ID NO: 61303 - DNA, 50 bp, synthetic construct
  source 1..50: mol_type = other DNA
aaaaggtggtgagataaatggcatattcctcatttacatcaccaggtttt

SEQ ID NO: 61304 - DNA, 50 bp, synthetic construct
  source 1..50: mol_type = other DNA
agaatagttaaaaatatcattcataaatgaggtcattttagtatgtttcg

SEQ ID NO: 61305 - DNA, 50 bp, synthetic construct
  source 1..50: mol_type = other DNA
aaattctggatgcggtgaattttccgcgttatatgccgaatttagaaagc

SEQ ID NO: 61306 - DNA, 50 bp, synthetic construct
  source 1..50: mol_type = other DNA
acaaaaatatttaactaccttaattaaattgcgtagttaattaaaatcaa

SEQ ID NO: 61307 - DNA, 50 bp, synthetic construct
  source 1..50: mol_type = other DNA
caggggtcttatgtccataacctgctcaagttatctccacaagaccctca

SEQ ID NO: 61308 - DNA, 50 bp, synthetic construct
  source 1..50: mol_type = other DNA
cgggtatagggttaacggttcaatcaatacaactataaacgctatacacg

SEQ ID NO: 61309 - DNA, 50 bp, synthetic construct
  source 1..50: mol_type = other DNA
gaataagccacgccaaggggcctggatggagctcaagtcgtgctccgggt

SEQ ID NO: 61310 - DNA, 50 bp, synthetic construct
  source 1..50: mol_type = other DNA
cttcgtagccactgatccctggcagcccatcaacaacttcgacgacgcag

SEQ ID NO: 61311 - DNA, 50 bp, synthetic construct
  source 1..50: mol_type = other DNA
accacgccatcttccaggggttggcggctacctctggaaccgcatcgaac

SEQ ID NO: 61312 - DNA, 50 bp, synthetic construct
  source 1..50: mol_type = other DNA
catcactttcactcttattctgatacattagaaataaagaccaagctaag

SEQ ID NO: 61313 - DNA, 50 bp, synthetic construct
  source 1..50: mol_type = other DNA
ttgggcaagtttattttgttaagtgagtataacaaaatgaaattacccaa

SEQ ID NO: 61314 - DNA, 50 bp, synthetic construct
  source 1..50: mol_type = other DNA
tcatgacccatcccgggacgtcaccgcggatgtcttcggaaaaatcagtt

SEQ ID NO: 61315 - DNA, 50 bp, synthetic construct
  source 1..50: mol_type = other DNA
cgttcgtgtgcaccgtcagcagggcgtcatactgtcgttatgcctaatgc

SEQ ID NO: 61316 - DNA, 50 bp, synthetic construct
  source 1..50: mol_type = other DNA
ttttaaataatttatatagttttcaagaaagcggaaattatttactaaaa

SEQ ID NO: 61317 - DNA, 50 bp, synthetic construct
  source 1..50: mol_type = other DNA
ctaatcaaagagttacggacaaggttcccgctccaatttaggttctgtag

SEQ ID NO: 61318 - DNA, 50 bp, synthetic construct
  source 1..50: mol_type = other DNA
tcttccatttgaaattacctccattaataaagttaatattgttcctggat

SEQ ID NO: 61319 - DNA, 50 bp, synthetic construct
  source 1..50: mol_type = other DNA
acccgcgccgttggcgaccagcgccgcagctggtagcgcatcacactggc

SEQ ID NO: 61320 - DNA, 50 bp, synthetic construct
  source 1..50: mol_type = other DNA
agttcggagagtacactccccatccggttatactctgatctctctggaca

SEQ ID NO: 61321 - DNA, 50 bp, synthetic construct
  source 1..50: mol_type = other DNA
aggcgatacacacggcggatttcagctgaagattgcggtcaactgcgcct

SEQ ID NO: 61322 - DNA, 50 bp, synthetic construct
  source 1..50: mol_type = other DNA
aatagcagcagaacaagtaaaagaatcgacttgatgattatgcaactaaa

SEQ ID NO: 61323 - DNA, 50 bp, synthetic construct
  source 1..50: mol_type = other DNA
tgccacattagtgagaactatatgagggtatatccggtaagaatgcagca

SEQ ID NO: 61324 - DNA, 50 bp, synthetic construct
  source 1..50: mol_type = other DNA
cacctcattctaataaatattttaattaatatttcacttaaaaaatggcc

SEQ ID NO: 61325 - DNA, 50 bp, synthetic construct
  source 1..50: mol_type = other DNA
ggtatttgaattgcagtcaaaaagggtcttatgactggcaaactaattca

SEQ ID NO: 61326 - DNA, 50 bp, synthetic construct
  source 1..50: mol_type = other DNA
agggtgaattgagaactacaaaacccgatggtatgttcataatgcaccct

SEQ ID NO: 61327 - DNA, 50 bp, synthetic construct
  source 1..50: mol_type = other DNA
tcatagtatttcactaatgataattagcttctaatggttacattctatga

SEQ ID NO: 61328 - DNA, 50 bp, synthetic construct
  source 1..50: mol_type = other DNA
caataagaaagtatataaagagtattagatctttattaaagttcttattt

SEQ ID NO: 61329 - DNA, 50 bp, synthetic construct
  source 1..50: mol_type = other DNA
tgaccatgtcatgtcgccctgctcacgacgaggaggaagtgacatgacca

SEQ ID NO: 61330 - DNA, 50 bp, synthetic construct
  source 1..50: mol_type = other DNA
agaacccgtggcacttttggaccggacgggtactaaatggaacgggttcc

SEQ ID NO: 61331 - DNA, 50 bp, synthetic construct
  source 1..50: mol_type = other DNA
tataatagtgaaagtgtttttggaatttgaaaaatacttgtatagttgtg

SEQ ID NO: 61332 - DNA, 50 bp, synthetic construct
  source 1..50: mol_type = other DNA
gcgtgatttcacgcagttcgggttcaagcgtgaactgggtgaggaactga

SEQ ID NO: 61333 - DNA, 50 bp, synthetic construct
  source 1..50: mol_type = other DNA
ggtgtctctcacttttcgtggttgtaccactacgaacgcctgcccaagat

SEQ ID NO: 61334 - DNA, 50 bp, synthetic construct
  source 1..50: mol_type = other DNA
tgccgagcagccccgcgaccacctcgagggcgacgccaagctgggcgtca

SEQ ID NO: 61335 - DNA, 50 bp, synthetic construct
  source 1..50: mol_type = other DNA
cggcatcgaggcgggaggtgtactcgaccagcgctttcgggcaccctaac

SEQ ID NO: 61336 - DNA, 50 bp, synthetic construct
  source 1..50: mol_type = other DNA
tagaattaaaaacccttttatttacaaatgaaaaagggttgccattttaa

SEQ ID NO: 61337 - DNA, 50 bp, synthetic construct
  source 1..50: mol_type = other DNA
ataccatgcgcctcgcatggacaataaacaccataaaatcagctatttat

SEQ ID NO: 61338 - DNA, 50 bp, synthetic construct
  source 1..50: mol_type = other DNA
ctcgagggcttcctcgagaccaaggccatggcgggaagcaggccttctcc

SEQ ID NO: 61339 - DNA, 50 bp, synthetic construct
  source 1..50: mol_type = other DNA
tcgtttcggtgcctctttcgcgaggctctgcgtgaaaggcgccgtccgct

SEQ ID NO: 61340 - DNA, 50 bp, synthetic construct
  source 1..50: mol_type = other DNA
ataagtaataaataaagattttatttgactagcctttatttattctatat

SEQ ID NO: 61341 - DNA, 50 bp, synthetic construct
  source 1..50: mol_type = other DNA
tctaaaggcttaagatatcaagtctttcctccattttttatccatttcaa

SEQ ID NO: 61342 - DNA, 50 bp, synthetic construct
  source 1..50: mol_type = other DNA
cgcctgcgccatgccggccacgtcgtttggtggcggggattgcggtgatt

SEQ ID NO: 61343 - DNA, 50 bp, synthetic construct
  source 1..50: mol_type = other DNA
gtggaaccaataacatagcacgtctggatatgctctgcaaaaggttccat

SEQ ID NO: 61344 - DNA, 50 bp, synthetic construct
  source 1..50: mol_type = other DNA
gtggaactaataacatagcatgtctggatatgctctgcaaaaggttccat

SEQ ID NO: 61345 - DNA, 50 bp, synthetic construct
  source 1..50: mol_type = other DNA
tatttttacgaagcattctgcagaattgatgaaaacgatacataaattgg

SEQ ID NO: 61346 - DNA, 50 bp, synthetic construct
  source 1..50: mol_type = other DNA
taggagctgccttgtgataaaatggttattttatgctcgagaagagctcg

SEQ ID NO: 61347 - DNA, 50 bp, synthetic construct
  source 1..50: mol_type = other DNA
ccatgttgccgcccgtgacgagcgcgaacgggtcgccggtggcgcgctgg

SEQ ID NO: 61348 - DNA, 50 bp, synthetic construct
  source 1..50: mol_type = other DNA
ttggctttttatttcctttaaaattaaattttggcgaaaaagaaagagaa

SEQ ID NO: 61349 - DNA, 50 bp, synthetic construct
  source 1..50: mol_type = other DNA
caaccaataaaatatctaaaaagttagcttggtggttaattgaaggttta

SEQ ID NO: 61350 - DNA, 50 bp, synthetic construct
  source 1..50: mol_type = other DNA
ttaccctgtaaacttgtgtacctaatcagatgatatgatttaccgagtga

SEQ ID NO: 61351 - DNA, 50 bp, synthetic construct
  source 1..50: mol_type = other DNA
agaggatttttatttggattatgaaaagttaatccaaatgaattagagga

SEQ ID NO: 61352 - DNA, 50 bp, synthetic construct
  source 1..50: mol_type = other DNA
atttcatctgttaagggtactcatcttcgagtactctaagggacgaatcg

SEQ ID NO: 61353 - DNA, 50 bp, synthetic construct
  source 1..50: mol_type = other DNA
tttgacatatgccacatgcacacctaggtgtgcatatggtggtaacctcc

SEQ ID NO: 61354 - DNA, 50 bp, synthetic construct
  source 1..50: mol_type = other DNA
caattgattaaatgctttttgattagaattaatggatatcttatccgctc

SEQ ID NO: 61355 - DNA, 50 bp, synthetic construct
  source 1..50: mol_type = other DNA
ggattgtttctaatatccttttgtttagttaaaaatatcaatccgatttc

SEQ ID NO: 61356 - DNA, 50 bp, synthetic construct
  source 1..50: mol_type = other DNA
cgaggaggacgccaaaaagctcgagggcgagctctttggcgcaaggatta

SEQ ID NO: 61357 - DNA, 50 bp, synthetic construct
  source 1..50: mol_type = other DNA
caggtccagccgctgctagagtctatggcatcgactcagggacggacgca

SEQ ID NO: 61358 - DNA, 50 bp, synthetic construct
  source 1..50: mol_type = other DNA
gcatcggttagctttttgacacagtctactgtcagcaagccggccgtcat

SEQ ID NO: 61359 - DNA, 50 bp, synthetic construct
  source 1..50: mol_type = other DNA
cgccgggacggtgcgccggggcaggctccgcccgggccaccgaccggcgg

SEQ ID NO: 61360 - DNA, 50 bp, synthetic construct
  source 1..50: mol_type = other DNA
cgccgcggaagttgaagcgcagtacgcccttcgcgccgcgcagggaggcg

SEQ ID NO: 61361 - DNA, 50 bp, synthetic construct
  source 1..50: mol_type = other DNA
tagtggtgagatataatttttgtttaaacataaaattagccatgatgttt

SEQ ID NO: 61362 - DNA, 50 bp, synthetic construct
  source 1..50: mol_type = other DNA
caatatctcttgttcggatttactgaggtaaatcaagggtcattgtattg

SEQ ID NO: 61363 - DNA, 50 bp, synthetic construct
  source 1..50: mol_type = other DNA
tgctgcttcaattcttttacttgaaaatatgtaaaataaagagagccatt

SEQ ID NO: 61364 - DNA, 50 bp, synthetic construct
  source 1..50: mol_type = other DNA
atatgttcggactgaaccgtcccaggaagttcgaacttgtgtcctgatag

SEQ ID NO: 61365 - DNA, 50 bp, synthetic construct
  source 1..50: mol_type = other DNA
ggggtatattagcagcatctaaccttcgagacaagttctaaaactacccc

SEQ ID NO: 61366 - DNA, 50 bp, synthetic construct
  source 1..50: mol_type = other DNA
tttgcttgtcttatttacgggcattcgtactaataaattaaacactaaac

SEQ ID NO: 61367 - DNA, 50 bp, synthetic construct
  source 1..50: mol_type = other DNA
atagggcataaaagcccaacattcgcgaatgcttcgttttgccatcaagg

SEQ ID NO: 61368 - DNA, 50 bp, synthetic construct
  source 1..50: mol_type = other DNA
tctgaatctttgttgttgtgtgtgcatacatgaaacaacagcttagagcc

SEQ ID NO: 61369 - DNA, 50 bp, synthetic construct
  source 1..50: mol_type = other DNA
ctgaaaccttgaagctaccgcatagctggttctatcgtgataactttttt

SEQ ID NO: 61370 - DNA, 50 bp, synthetic construct
  source 1..50: mol_type = other DNA
ccttatatttttcttctgtctttctaaaacgaagcaataagttcttaagt

SEQ ID NO: 61371 - DNA, 50 bp, synthetic construct
  source 1..50: mol_type = other DNA
ggagatagtatcaagtctttcaaaattttctacactttatttacttagtg

SEQ ID NO: 61372 - DNA, 50 bp, synthetic construct
  source 1..50: mol_type = other DNA
cggcggcccgtccggtcccgagcggccgcgctcagtcggcgtcgccgccg

SEQ ID NO: 61373 - DNA, 50 bp, synthetic construct
  source 1..50: mol_type = other DNA
ctaatcatcacgaagcaaaggagaattctaaggtgcggagaaatgattat

SEQ ID NO: 61374 - DNA, 50 bp, synthetic construct
  source 1..50: mol_type = other DNA
gggcggttttttaatgtttagattgaaggctaaacaattaaatggtcctt

SEQ ID NO: 61375 - DNA, 50 bp, synthetic construct
  source 1..50: mol_type = other DNA
tgcgtatggtattcattgaagtaaatttacttgctgccattcctgccgca

SEQ ID NO: 61376 - DNA, 50 bp, synthetic construct
  source 1..50: mol_type = other DNA
caccatctttgattggcttaccaatttttctctgttcttcacagatggtg

SEQ ID NO: 61377 - DNA, 50 bp, synthetic construct
  source 1..50: mol_type = other DNA
tttcttcgttaaagccaatctgtttaaaatcttttcctttgttccggtac

SEQ ID NO: 61378 - DNA, 50 bp, synthetic construct
  source 1..50: mol_type = other DNA
tgtttttttatgatcttgtttctactgagcggaaagatcataaacaaaca

SEQ ID NO: 61379 - DNA, 50 bp, synthetic construct
  source 1..50: mol_type = other DNA
ctcattttcatataaaagttccattattggaagtttttaaagaaacttta

SEQ ID NO: 61380 - DNA, 50 bp, synthetic construct
  source 1..50: mol_type = other DNA
tttacacttctattacttctttatcggtaaagaagcaagcaaccgaaaac

SEQ ID NO: 61381 - DNA, 50 bp, synthetic construct
  source 1..50: mol_type = other DNA
gctacaattaatggaatttttttaatgccaaaaataccttgatatgtagc

SEQ ID NO: 61382 - DNA, 50 bp, synthetic construct
  source 1..50: mol_type = other DNA
aggcccctgtaacaattttcctttataatgaaaaaagttatgatcatccc

SEQ ID NO: 61383 - DNA, 50 bp, synthetic construct
  source 1..50: mol_type = other DNA
gaactagcactaagtaatctagatataacttagttatattgtagcacatg

SEQ ID NO: 61384 - DNA, 50 bp, synthetic construct
  source 1..50: mol_type = other DNA
gaagaatataaagaagcaaaaaaattctgtttcttgaacttctaatcttc

SEQ ID NO: 61385 - DNA, 50 bp, synthetic construct
  source 1..50: mol_type = other DNA
ccctatcctactttttatgaaggttagagtttataataactattaaaggg

SEQ ID NO: 61386 - DNA, 50 bp, synthetic construct
  source 1..50: mol_type = other DNA
tttttcacaaattttaacgaataaaattagaaaagaaaaatctgtcaaaa

SEQ ID NO: 61387 - DNA, 50 bp, synthetic construct
  source 1..50: mol_type = other DNA
tgatagaataatatagtaaaaaatttgctaaaaaccaactcatactatca

SEQ ID NO: 61388 - DNA, 50 bp, synthetic construct
  source 1..50: mol_type = other DNA
ttaactctctcccttcatttaactcaggttaaaagaagattgcaaatatc

SEQ ID NO: 61389 - DNA, 50 bp, synthetic construct
  source 1..50: mol_type = other DNA
tcgtcaccttgttggtgtaattagatgccatgctacgaccaattggacga

SEQ ID NO: 61390 - DNA, 50 bp, synthetic construct
  source 1..50: mol_type = other DNA
tttttgccgtattgacataccgcaagtgcggtgtataattaaggcataaa

SEQ ID NO: 61391 - DNA, 50 bp, synthetic construct
  source 1..50: mol_type = other DNA
acttgcgggacagatcggggcgcgacggggccgtgagctttcctgcagcg

SEQ ID NO: 61392 - DNA, 50 bp, synthetic construct
  source 1..50: mol_type = other DNA
tatgagccttcgcgtccccacgggcttccgaaaggaatcgaaagccgatg

SEQ ID NO: 61393 - DNA, 50 bp, synthetic construct
  source 1..50: mol_type = other DNA
tttctatcggtttttctgtatattcaaagggacaaagggacagagaaaaa

SEQ ID NO: 61394 - DNA, 50 bp, synthetic construct
  source 1..50: mol_type = other DNA
cgccccgcctccgaggcccgggacagcgccgcccgctcggcggcggagca

SEQ ID NO: 61395 - DNA, 50 bp, synthetic construct
  source 1..50: mol_type = other DNA
aatgctgtaatacaaatttccattttgtgcaaatattatattacagcatt

SEQ ID NO: 61396 - DNA, 50 bp, synthetic construct
  source 1..50: mol_type = other DNA
ggacgctgacactgacattcaccgtagtgtgatcgtaattgtctttttaa

SEQ ID NO: 61397 - DNA, 50 bp, synthetic construct
  source 1..50: mol_type = other DNA
aaaaataaatttggaatgttaggaattcccttcattggtgatttgtttaa

SEQ ID NO: 61398 - DNA, 50 bp, synthetic construct
  source 1..50: mol_type = other DNA
aaataaaatactttctttctgtgaataaaaggctaaaaagcatttaatat

SEQ ID NO: 61399 - DNA, 50 bp, synthetic construct
  source 1..50: mol_type = other DNA
aaaagccctcataaagtgggcttttaaaaggaaacttaatgttaagttta

SEQ ID NO: 61400 - DNA, 50 bp, synthetic construct
  source 1..50: mol_type = other DNA
aaacaaccaattgtgaaaagtaaaattatacaactcacttttatatgttt

SEQ ID NO: 61401 - DNA, 50 bp, synthetic construct
  source 1..50: mol_type = other DNA
catttttttggcccctttgtttattagcaaataacggtgtaaaaaagagt

SEQ ID NO: 61402 - DNA, 50 bp, synthetic construct
  source 1..50: mol_type = other DNA
tattttttataggtaatagtttgttgacaaactatattattcttcaaacc

SEQ ID NO: 61403 - DNA, 50 bp, synthetic construct
  source 1..50: mol_type = other DNA
tgatatacagctttttcagaacgtatttttcctggaaagccacgggatca

SEQ ID NO: 61404 - DNA, 50 bp, synthetic construct
  source 1..50: mol_type = other DNA
ctctcttgttcttatccatattatttcttttttatttaagaaattaagag

SEQ ID NO: 61405 - DNA, 50 bp, synthetic construct
  source 1..50: mol_type = other DNA
gtttgtgcctgtgtaccttctggtaaaccacggggtacataggtacaaac

SEQ ID NO: 61406 - DNA, 50 bp, synthetic construct
  source 1..50: mol_type = other DNA
tatttgaattgattctaaaatcagaatgtattatcgaataagtttaaata

SEQ ID NO: 61407 - DNA, 50 bp, synthetic construct
  source 1..50: mol_type = other DNA
atggtgaggtttatttttgagtaataatcaccaaaattggtgctatgccg

SEQ ID NO: 61408 - DNA, 50 bp, synthetic construct
  source 1..50: mol_type = other DNA
tttccaaacaaaaacgcccctaccgttttaggcgctctcctgaatgcgta

SEQ ID NO: 61409 - DNA, 50 bp, synthetic construct
  source 1..50: mol_type = other DNA
ggggcatttgataaaacttcagaaatgtctattattcaaagtgttagcca

SEQ ID NO: 61410 - DNA, 50 bp, synthetic construct
  source 1..50: mol_type = other DNA
cgtaaactcataacaatgcgctttcagtgatgaaggggtgagtggttaca

SEQ ID NO: 61411 - DNA, 50 bp, synthetic construct
  source 1..50: mol_type = other DNA
tacagacaagaaaaatcacgaagcggattttgagttttggggagggtttt

SEQ ID NO: 61412 - DNA, 50 bp, synthetic construct
  source 1..50: mol_type = other DNA
aaataaaaaaattaaaaatatttttaacaatttttctaatttacctatag

SEQ ID NO: 61413 - DNA, 50 bp, synthetic construct
  source 1..50: mol_type = other DNA
ggaatctacgaacacatctgtcttgtaacctgcagcggttcgctggtcat

SEQ ID NO: 61414 - DNA, 50 bp, synthetic construct
  source 1..50: mol_type = other DNA
gatttgctttcataccctctccttaacgcaggagagtattgaatatcaaa

SEQ ID NO: 61415 - DNA, 50 bp, synthetic construct
  source 1..50: mol_type = other DNA
aatatgttttcttgtcatgggcaagtcgaaaatacccatgagaaaataga

SEQ ID NO: 61416 - DNA, 50 bp, synthetic construct
  source 1..50: mol_type = other DNA
agccagcttgtccggggggtgagtgcagacgccctgcgcatcatgcagct

SEQ ID NO: 61417 - DNA, 50 bp, synthetic construct
  source 1..50: mol_type = other DNA
tgtaggcgaacggacggtgtagcctcatctccaccattggttcgcctacc

SEQ ID NO: 61418 - DNA, 50 bp, synthetic construct
  source 1..50: mol_type = other DNA
caggcattcgcggacgccgagcgcgctcggtcgcggtcctcgaacgcctc

SEQ ID NO: 61419 - DNA, 50 bp, synthetic construct
  source 1..50: mol_type = other DNA
taaatagagcggttgtattgagaaatctctcgacagaatcgctcttcttt

SEQ ID NO: 61420 - DNA, 50 bp, synthetic construct
  source 1..50: mol_type = other DNA
tatcaagttatgagaatcaggtcaattaccatgattcgtatagaaataga

SEQ ID NO: 61421 - DNA, 50 bp, synthetic construct
  source 1..50: mol_type = other DNA
tatagcctttttttgcatttttgtgatagaaaggagaaaaaatgactaaa

SEQ ID NO: 61422 - DNA, 50 bp, synthetic construct
  source 1..50: mol_type = other DNA
gcactgcagttcctcctttctatcaataccaaaatcatcaacttcctcat

SEQ ID NO: 61423 - DNA, 50 bp, synthetic construct
  source 1..50: mol_type = other DNA
atttacttttaagaaaattattaaatataagatatttatgtaaaataaca

SEQ ID NO: 61424 - DNA, 50 bp, synthetic construct
  source 1..50: mol_type = other DNA
ctctctttagtttgggaaaatctctagatgatgtagctggtttgcgagaa

SEQ ID NO: 61425 - DNA, 50 bp, synthetic construct
  source 1..50: mol_type = other DNA
tcggccggaatatttgttgagccggagcacgctacaaaggatctggccgg

SEQ ID NO: 61426 - DNA, 50 bp, synthetic construct
  source 1..50: mol_type = other DNA
tttagtttctcgttttctctcgttggagggagaggaaatgggatacaaaa

SEQ ID NO: 61427 - DNA, 50 bp, synthetic construct
  source 1..50: mol_type = other DNA
ttaccgcttggcgatagcccaagatttccctggtaccggccaaggataaa

SEQ ID NO: 61428 - DNA, 50 bp, synthetic construct
  source 1..50: mol_type = other DNA
tgattttgataatcatctgtttgaattgatgaaaacgatacataaattgg

SEQ ID NO: 61429 - DNA, 50 bp, synthetic construct
  source 1..50: mol_type = other DNA
aaagcccttaatcccaagggctttaagcccttcaaatacaaaaggggtac

SEQ ID NO: 61430 - DNA, 50 bp, synthetic construct
  source 1..50: mol_type = other DNA
ttaccactagtaccggctcgcttgtacgagcatcaccctttcagggccat

SEQ ID NO: 61431 - DNA, 50 bp, synthetic construct
  source 1..50: mol_type = other DNA
ccgtgcagtactgtttacgcagaagcttctttgttgcgggtatcgcagtg

SEQ ID NO: 61432 - DNA, 50 bp, synthetic construct
  source 1..50: mol_type = other DNA
agggtagatgatgagcgattatactggtttagttagcatccatataccct

SEQ ID NO: 61433 - DNA, 50 bp, synthetic construct
  source 1..50: mol_type = other DNA
acctccttagcttagtaactattatataaatgacagaaaaagaaggtgaa

SEQ ID NO: 61434 - DNA, 50 bp, synthetic construct
  source 1..50: mol_type = other DNA
ttttcttggcgtacattgtatcacaagtactaaaatgacaccaaagaaga

SEQ ID NO: 61435 - DNA, 50 bp, synthetic construct
  source 1..50: mol_type = other DNA
agggtagtttagcgatatttcagcttggtgacaagttcctaatataccct

SEQ ID NO: 61436 - DNA, 50 bp, synthetic construct
  source 1..50: mol_type = other DNA
taaaaatggtttcgtaatatagtgcacatacgtttacgcaaccattatac

SEQ ID NO: 61437 - DNA, 50 bp, synthetic construct
  source 1..50: mol_type = other DNA
tgaagcattttgaggttatctgattattcagatatttcttttatatttca

SEQ ID NO: 61438 - DNA, 50 bp, synthetic construct
  source 1..50: mol_type = other DNA
caccggaccggggcaatcgattttgcaaaaaggggccaccaggccgcagc

SEQ ID NO: 61439 - DNA, 50 bp, synthetic construct
  source 1..50: mol_type = other DNA
cacgtccgcaagatcgcgacgcagtacgtctctcgaccttcacggacgca

SEQ ID NO: 61440 - DNA, 50 bp, synthetic construct
  source 1..50: mol_type = other DNA
tggcggatgtacgagactgcacgtacccgcgcacccccgcgcacccgcac

SEQ ID NO: 61441 - DNA, 50 bp, synthetic construct
  source 1..50: mol_type = other DNA
ttataggggaccaaatgaggtatagggatacgccaattggtctccgcctg

SEQ ID NO: 61442 - DNA, 50 bp, synthetic construct
  source 1..50: mol_type = other DNA
ggtctgatcttgttgtcaatgtggatgcacttccacaacaagacaagggc

SEQ ID NO: 61443 - DNA, 50 bp, synthetic construct
  source 1..50: mol_type = other DNA
tacataattttatattttagtagatatctactaaaagtatataagcaggt

SEQ ID NO: 61444 - DNA, 50 bp, synthetic construct
  source 1..50: mol_type = other DNA
aaggagggtctatgaaaaacaccctaggggctttttcatgccttcagctt

SEQ ID NO: 61445 - DNA, 50 bp, synthetic construct
  source 1..50: mol_type = other DNA
ctttgttctgctcatgttttttcctccagatactaatgagctgaaaggag

SEQ ID NO: 61446 - DNA, 50 bp, synthetic construct
  source 1..50: mol_type = other DNA
tcgattttattgattttccgcataaatgtgaatttaatcaacgagattaa

SEQ ID NO: 61447 - DNA, 50 bp, synthetic construct
  source 1..50: mol_type = other DNA
cgcaacgcaactaattgcgcggtgatgaatgcgctataggttgcaatgtt

SEQ ID NO: 61448 - DNA, 50 bp, synthetic construct
  source 1..50: mol_type = other DNA
gtgtgagaataccacctaccagtctcgaatggtagggggttattccacac

SEQ ID NO: 61449 - DNA, 50 bp, synthetic construct
  source 1..50: mol_type = other DNA
gaaaaatacagggttaaacttgcccgggtctataataccccggattctct

SEQ ID NO: 61450 - DNA, 50 bp, synthetic construct
  source 1..50: mol_type = other DNA
agtggtgtattttgccacattttgtttatgttatgcatgaatacaccatg

SEQ ID NO: 61451 - DNA, 50 bp, synthetic construct
  source 1..50: mol_type = other DNA
tagaggattttagtgtcattgattcaaatgtaggaaactaaaatactcta

SEQ ID NO: 61452 - DNA, 50 bp, synthetic construct
  source 1..50: mol_type = other DNA
ttatggctaatgctacaatgccgaattcggttttctaagaggcctgttaa

SEQ ID NO: 61453 - DNA, 50 bp, synthetic construct
  source 1..50: mol_type = other DNA
agtatagggtttatatcgttaggctgcccgaagggagtgtcatctatact

SEQ ID NO: 61454 - DNA, 50 bp, synthetic construct
  source 1..50: mol_type = other DNA
ttttcttttttcggacataatttatttaaatgatgtaccaaaattcgaaa

SEQ ID NO: 61455 - DNA, 50 bp, synthetic construct
  source 1..50: mol_type = other DNA
gggtgtacatactatcataactgttcctagttagtcaagtatgtacaccc

SEQ ID NO: 61456 - DNA, 50 bp, synthetic construct
  source 1..50: mol_type = other DNA
tagttaagaaatcataaagatagtagcacttttagcgtaattcttcaacg

SEQ ID NO: 61457 - DNA, 50 bp, synthetic construct
  source 1..50: mol_type = other DNA
agttctttcaatcgctaaccgctggacataggttggcgatacacacaact

SEQ ID NO: 61458 - DNA, 50 bp, synthetic construct
  source 1..50: mol_type = other DNA
aaggtaaaatgttgtcattttgtagttataaaacaacatcatttttccat

SEQ ID NO: 61459 - DNA, 50 bp, synthetic construct
  source 1..50: mol_type = other DNA
aaagaattcttctttatttctaccttagtagaagtaaagaagaattaaaa

SEQ ID NO: 61460 - DNA, 50 bp, synthetic construct
  source 1..50: mol_type = other DNA
accacttggtcctacgatcgctgttaacaaaggttataggtgaatactaa

SEQ ID NO: 61461 - DNA, 50 bp, synthetic construct
  source 1..50: mol_type = other DNA
tttttgcaatcactacacatctcaaatgtgatgtgtagtgattgcaaaaa

SEQ ID NO: 61462 - DNA, 50 bp, synthetic construct
  source 1..50: mol_type = other DNA
catttgtaaacactacacattgcatttgtgatgcgtagtgtttgcaaaaa

SEQ ID NO: 61463 - DNA, 50 bp, synthetic construct
  source 1..50: mol_type = other DNA
taaaggggaggccgccgagttcgacgtcgaactcttattcttcaggaatg

SEQ ID NO: 61464 - DNA, 50 bp, synthetic construct
  source 1..50: mol_type = other DNA
atgctactttatgacacataagcatttactcatgtgtgataaagaagtaa

SEQ ID NO: 61465 - DNA, 50 bp, synthetic construct
  source 1..50: mol_type = other DNA
aacgctcggcacgagcggctcgacgcgtcgtaggtgataatgcgagagcc

SEQ ID NO: 61466 - DNA, 50 bp, synthetic construct
  source 1..50: mol_type = other DNA
tgaaagatatgatttctgctagcaaaataaagcagaaactgcgtaaaata

SEQ ID NO: 61467 - DNA, 50 bp, synthetic construct
  source 1..50: mol_type = other DNA
gacataaaatctgtaataatctcaaattttattatatgcaccgctatggt

SEQ ID NO: 61468 - DNA, 50 bp, synthetic construct
  source 1..50: mol_type = other DNA
acacagttaatcatatttttatctctgttttaaacgatcaatgagtccaa

SEQ ID NO: 61469 - DNA, 50 bp, synthetic construct
  source 1..50: mol_type = other DNA
tatgattggtatgataagatagggaacccaaagtgtcaatacctatcagt

SEQ ID NO: 61470 - DNA, 50 bp, synthetic construct
  source 1..50: mol_type = other DNA
cgggtgtaaagacttgctttcgcatactcgatagtctatctttacatcaa

SEQ ID NO: 61471 - DNA, 50 bp, synthetic construct
  source 1..50: mol_type = other DNA
tgtatgtaaatctaaactattgagtactcgaatgtcaataattacagccg

SEQ ID NO: 61472 - DNA, 50 bp, synthetic construct
  source 1..50: mol_type = other DNA
cgacgccgacaccgacgccgcccacgttctcgacatcgtcggcacgctcg

SEQ ID NO: 61473 - DNA, 50 bp, synthetic construct
  source 1..50: mol_type = other DNA
aggaaaccgttccagcgcgtgccggtcggggaccgagtacgcgaggtcca

SEQ ID NO: 61474 - DNA, 50 bp, synthetic construct
  source 1..50: mol_type = other DNA
cgcggctgcaatacgcgccgagctcggcgtcggccggggcgccagcgttg

SEQ ID NO: 61475 - DNA, 50 bp, synthetic construct
  source 1..50: mol_type = other DNA
tacccttcgcttcggcatcgagatcgttctcggtgcggacggaggtggtc

SEQ ID NO: 61476 - DNA, 50 bp, synthetic construct
  source 1..50: mol_type = other DNA
cgtcgccgacgccatccgcagcgtggacctcgacgtcggcgccggcgtcg

SEQ ID NO: 61477 - DNA, 50 bp, synthetic construct
  source 1..50: mol_type = other DNA
ggcagtttcgtaggcatagtagaggggactaacaagtgtttggaattgca

SEQ ID NO: 61478 - DNA, 50 bp, synthetic construct
  source 1..50: mol_type = other DNA
agcggtttatttttttgtgtacacatttgtacaaaaaccattattttgta

SEQ ID NO: 61479 - DNA, 50 bp, synthetic construct
  source 1..50: mol_type = other DNA
tctttatgctatccgtttgaactcttcagttgggtagggtacaagtaagt

SEQ ID NO: 61480 - DNA, 50 bp, synthetic construct
  source 1..50: mol_type = other DNA
tatgattactttatatgtgcagaaatttctacacattaaaataagttatt

SEQ ID NO: 61481 - DNA, 50 bp, synthetic construct
  source 1..50: mol_type = other DNA
tatgtcaataatggaaacatatcccgaaacaagtttactttattgacata

SEQ ID NO: 61482 - DNA, 50 bp, synthetic construct
  source 1..50: mol_type = other DNA
tttacatcatacgataactaatgcgagctttagttattactacacaaaaa

SEQ ID NO: 61483 - DNA, 50 bp, synthetic construct
  source 1..50: mol_type = other DNA
tcgggaacctcgatcaggctgtaaggatacaacctgaaaccctgtctgac

SEQ ID NO: 61484 - DNA, 50 bp, synthetic construct
  source 1..50: mol_type = other DNA
atttaatcaagaatgtttttagtttaaactaataacttttatgattaaat

SEQ ID NO: 61485 - DNA, 50 bp, synthetic construct
  source 1..50: mol_type = other DNA
tgtaataataagtttagaaataatacattatttgccgatatagacttgat

SEQ ID NO: 61486 - DNA, 50 bp, synthetic construct
  source 1..50: mol_type = other DNA
ttgttatttgctgattttagtggtataaaattaaaaaacataataaggtg

SEQ ID NO: 61487 - DNA, 50 bp, synthetic construct
  source 1..50: mol_type = other DNA
aggtggattatggaattcacagaattttctatgaatgacaaaaacaccct

SEQ ID NO: 61488 - DNA, 50 bp, synthetic construct
  source 1..50: mol_type = other DNA
atcaccgaagaagggttattacaaatctgtaggttgccttgatctgctcg

SEQ ID NO: 61489 - DNA, 50 bp, synthetic construct
  source 1..50: mol_type = other DNA
gctgtgacacaaatttcaaagtcaattttgccgttcctatccggcacttg

SEQ ID NO: 61490 - DNA, 50 bp, synthetic construct
  source 1..50: mol_type = other DNA
tgccgacagccactttcttcccttcggaatagtggggctggctgtcggaa

SEQ ID NO: 61491 - DNA, 50 bp, synthetic construct
  source 1..50: mol_type = other DNA
gatgtgctataattctggtgcagaggattgcgccgggctggtagtaccaa

SEQ ID NO: 61492 - DNA, 50 bp, synthetic construct
  source 1..50: mol_type = other DNA
taagttattgagattgaactaaagcgaatgtgatataactcaaagagaca

SEQ ID NO: 61493 - DNA, 50 bp, synthetic construct
  source 1..50: mol_type = other DNA
caacgccttgtcgcgcgggtgcgccggcgcacgccaccgaagcctacgaa

SEQ ID NO: 61494 - DNA, 50 bp, synthetic construct
  source 1..50: mol_type = other DNA
cagtgttacatgcgaaaaagctggtcgcaagtattttgtatgtaacactg

SEQ ID NO: 61495 - DNA, 50 bp, synthetic construct
  source 1..50: mol_type = other DNA
attgcgtagaagaggttatagctggaatgtaataaaaaatataaatgcat

SEQ ID NO: 61496 - DNA, 50 bp, synthetic construct
  source 1..50: mol_type = other DNA
gcatcatctttggaaaatcctaactttgcagtattttaaatacatcttta

SEQ ID NO: 61497 - DNA, 50 bp, synthetic construct
  source 1..50: mol_type = other DNA
cattccctttaagctgtttcatttaaaaacacgtacactctcaatcctgt

SEQ ID NO: 61498 - DNA, 50 bp, synthetic construct
  source 1..50: mol_type = other DNA
tagaggattttagtgccattgattcaaatacaggaaactaaaatactcta

SEQ ID NO: 61499 - DNA, 50 bp, synthetic construct
  source 1..50: mol_type = other DNA
caaagggtgaagctcattttttattttaaaaaaatgaagactgcagattt

SEQ ID NO: 61500 - DNA, 50 bp, synthetic construct
  source 1..50: mol_type = other DNA
tatactaatagcttgggcccacctggtggttttcctcttctattcctcga

SEQ ID NO: 61501 - DNA, 50 bp, synthetic construct
  source 1..50: mol_type = other DNA
attttgatcctcctttaacttttataaaaaagttaatgttcgatatgcaa

SEQ ID NO: 61502 - DNA, 50 bp, synthetic construct
  source 1..50: mol_type = other DNA
acaagcttgttgaattatttaaaaaatggaaaataaaatgaaaagcaaac

SEQ ID NO: 61503 - DNA, 50 bp, synthetic construct
  source 1..50: mol_type = other DNA
cacctgcgcgggatcgacaccggccagcgctgcgggatgaggtggcccag

SEQ ID NO: 61504 - DNA, 50 bp, synthetic construct
  source 1..50: mol_type = other DNA
gcgtgcacagaccagccagtaccgttcttgatcgacttgcacccgctgac

SEQ ID NO: 61505 - DNA, 50 bp, synthetic construct
  source 1..50: mol_type = other DNA
aggacaacgcttagaaatcttgatacgtcaccaatgctaatagtaacgct

SEQ ID NO: 61506 - DNA, 50 bp, synthetic construct
  source 1..50: mol_type = other DNA
ttctcacggtgataaactcccatgcagacatgagattacgcagatgattt

SEQ ID NO: 61507 - DNA, 50 bp, synthetic construct
  source 1..50: mol_type = other DNA
tgggatgacttgattttttttgtaatacaaacaaatataaaattttacga

SEQ ID NO: 61508 - DNA, 50 bp, synthetic construct
  source 1..50: mol_type = other DNA
ttaacgttatagaatttggttttcttactaaccaatgcccctatcgttat

SEQ ID NO: 61509 - DNA, 50 bp, synthetic construct
  source 1..50: mol_type = other DNA
ataaataatttaaaaaatttagcaaagcgtaccacaaataaaactaaaaa

SEQ ID NO: 61510 - DNA, 50 bp, synthetic construct
  source 1..50: mol_type = other DNA
ttattttatctaaccatttttagaattttaaaaatggttagataaaataa

SEQ ID NO: 61511 - DNA, 50 bp, synthetic construct
  source 1..50: mol_type = other DNA
ccaacatcaataagatgttgggcgtttgccgaacatactttggaaccctt

SEQ ID NO: 61512 - DNA, 50 bp, synthetic construct
  source 1..50: mol_type = other DNA
caaaaaataaaacatctgacatataaatataactacttttttgttttagt

SEQ ID NO: 61513 - DNA, 50 bp, synthetic construct
  source 1..50: mol_type = other DNA
tctctcggtgtaggtacaggttttgttccctctttgcgtccagcgagaga

SEQ ID NO: 61514 - DNA, 50 bp, synthetic construct
  source 1..50: mol_type = other DNA
ataatcgcctataaagaaaggtatttggatactattttaaacgcaagcaa

SEQ ID NO: 61515 - DNA, 50 bp, synthetic construct
  source 1..50: mol_type = other DNA
ttacagctaaataatatgtcttttatggaagacatataaaaaagggactt

SEQ ID NO: 61516 - DNA, 50 bp, synthetic construct
  source 1..50: mol_type = other DNA
tttagtacctcgttatctctcgctggacggagaacaaacgagaaactaaa

SEQ ID NO: 61517 - DNA, 50 bp, synthetic construct
  source 1..50: mol_type = other DNA
agtagtcgcaaagattgtgttaaatgataaacacaatagttattaaaata

SEQ ID NO: 61518 - DNA, 50 bp, synthetic construct
  source 1..50: mol_type = other DNA
tctatttttgttatctttttcatcatgattatcaaaatcataaaaataaa

SEQ ID NO: 61519 - DNA, 50 bp, synthetic construct
  source 1..50: mol_type = other DNA
tttagtacctcgatttctctcgttggaagaagaagaaacgagataccaaa

SEQ ID NO: 61520 - DNA, 50 bp, synthetic construct
  source 1..50: mol_type = other DNA
tgcagactttagccgcaaagtcgatttcgaccgcgcgaccggccagtgga

SEQ ID NO: 61521 - DNA, 50 bp, synthetic construct
  source 1..50: mol_type = other DNA
tgttttctatgaagggaaaagaacatgttttctccttttcatatgcaaga

SEQ ID NO: 61522 - DNA, 50 bp, synthetic construct
  source 1..50: mol_type = other DNA
cccgcacccgggcgcggtccggatgctgggggagatcgcccggctgcggg

SEQ ID NO: 61523 - DNA, 50 bp, synthetic construct
  source 1..50: mol_type = other DNA
gttttcataggtagacctccttgttaattatagacaatgcaaatgaaaaa

SEQ ID NO: 61524 - DNA, 50 bp, synthetic construct
  source 1..50: mol_type = other DNA
ggctccggcccggtgcgtgacgctgtgccgagggcgacctgggcgcagcg

SEQ ID NO: 61525 - DNA, 50 bp, synthetic construct
  source 1..50: mol_type = other DNA
cctggacctcaccgaggtcaccacgacgggtgaccagggaccgggcacag

SEQ ID NO: 61526 - DNA, 50 bp, synthetic construct
  source 1..50: mol_type = other DNA
ttttggaaaaaacaatttaatttgttgaaattaaattagcttttatctaa

SEQ ID NO: 61527 - DNA, 50 bp, synthetic construct
  source 1..50: mol_type = other DNA
ataatttttaggtatacctatattaagaaataggaacccaataaatcaca

SEQ ID NO: 61528 - DNA, 50 bp, synthetic construct
  source 1..50: mol_type = other DNA
gtgtcagggagtgcaaatgtagtaacttttgtctgttgactaagtaatgc

SEQ ID NO: 61529 - DNA, 50 bp, synthetic construct
  source 1..50: mol_type = other DNA
taccattcaagagctttatgcggattatgtcattaacctaacgagtaatt

SEQ ID NO: 61530 - DNA, 50 bp, synthetic construct
  source 1..50: mol_type = other DNA
ggtgcgggaaggcttcaatcatcacgaggtgatcgacggcttcccgcact

SEQ ID NO: 61531 - DNA, 50 bp, synthetic construct
  source 1..50: mol_type = other DNA
ccagttgagcgccaccggcgaatttctgcgtgccggtaccccggacgggg

SEQ ID NO: 61532 - DNA, 50 bp, synthetic construct
  source 1..50: mol_type = other DNA
cgttcgcctcgctcggcgcgcaggcgcgagctctacgagcggttcttccg

SEQ ID NO: 61533 - DNA, 50 bp, synthetic construct
  source 1..50: mol_type = other DNA
gtttcaggttgtatccatacatcactcaatgattcgattacgcctgacga

SEQ ID NO: 61534 - DNA, 50 bp, synthetic construct
  source 1..50: mol_type = other DNA
ctgtatactaaaataactaacatcgtgatgctagttctttttgacgacaa

SEQ ID NO: 61535 - DNA, 50 bp, synthetic construct
  source 1..50: mol_type = other DNA
cattcctctctcctttgtaggtaaatttacctttaagcttctgaccaaat

SEQ ID NO: 61536 - DNA, 50 bp, synthetic construct
  source 1..50: mol_type = other DNA
tatgattaagaaactatttgaggtttcggtcaaatagtttttggagattg

SEQ ID NO: 61537 - DNA, 50 bp, synthetic construct
  source 1..50: mol_type = other DNA
gtacttatactattataaataactacccagttttgccatagaagatgtac

SEQ ID NO: 61538 - DNA, 50 bp, synthetic construct
  source 1..50: mol_type = other DNA
ccgccgaattggctcgccaagctgcccatgacaaaagtccatgggcgctc

SEQ ID NO: 61539 - DNA, 50 bp, synthetic construct
  source 1..50: mol_type = other DNA
gatttgcagccggcgtccattataaatactcgccctggcctctgaaaacg

SEQ ID NO: 61540 - DNA, 50 bp, synthetic construct
  source 1..50: mol_type = other DNA
aacaccaccgacaaccctgcagccaaggatttatcgtcgccggtatcgtt

SEQ ID NO: 61541 - DNA, 50 bp, synthetic construct
  source 1..50: mol_type = other DNA
gaaagacacctttcaaaatattcatttgaatctttattcgagtggttttc

SEQ ID NO: 61542 - DNA, 50 bp, synthetic construct
  source 1..50: mol_type = other DNA
cttctcatatcgattgatccatatcctattgtatcaaattagcggagttg

SEQ ID NO: 61543 - DNA, 50 bp, synthetic construct
  source 1..50: mol_type = other DNA
ccgcacgtaggttgtagggtgagcggaatcacctttcaacctacgtgacg

SEQ ID NO: 61544 - DNA, 50 bp, synthetic construct
  source 1..50: mol_type = other DNA
tgtagcggctataatttttttaaatagagtgatatatagtgtgctgtaca

SEQ ID NO: 61545 - DNA, 50 bp, synthetic construct
  source 1..50: mol_type = other DNA
gaaaccattgtggttacagccttttttgatgcttataccaaaaaggttga

SEQ ID NO: 61546 - DNA, 50 bp, synthetic construct
  source 1..50: mol_type = other DNA
ttagaattactttctaaaaaagattaaccttttagggacagagaaaataa

SEQ ID NO: 61547 - DNA, 50 bp, synthetic construct
  source 1..50: mol_type = other DNA
aaactactcttggtctttctcaacatgggttgaaacacaaggaggaaatt

SEQ ID NO: 61548 - DNA, 50 bp, synthetic construct
  source 1..50: mol_type = other DNA
gtgtagttccttgtaaactgacctaaagtgcagtttacaagggactacac

SEQ ID NO: 61549 - DNA, 50 bp, synthetic construct
  source 1..50: mol_type = other DNA
agtttggacaataatgctaccgtctcaacttgctcattattgtccaaacc

SEQ ID NO: 61550 - DNA, 50 bp, synthetic construct
  source 1..50: mol_type = other DNA
attacgaaagagaatctgaagacttttatacgagttatattcttcgtaat

SEQ ID NO: 61551 - DNA, 50 bp, synthetic construct
  source 1..50: mol_type = other DNA
attaagagcatcttttgaataaggattctaatataaaattgcaaaataaa

SEQ ID NO: 61552 - DNA, 50 bp, synthetic construct
  source 1..50: mol_type = other DNA
ataaattacttttctttagaaataataatttctacaaaaaaagcaaacag

SEQ ID NO: 61553 - DNA, 50 bp, synthetic construct
  source 1..50: mol_type = other DNA
gcttgtgaggattcacagacagcctcaccggtcgatgaaccaatacaagc

SEQ ID NO: 61554 - DNA, 50 bp, synthetic construct
  source 1..50: mol_type = other DNA
gaacgttttacgagctatttagcatccctttaatagcacaaatcgcgtac

SEQ ID NO: 61555 - DNA, 50 bp, synthetic construct
  source 1..50: mol_type = other DNA
caatgtccttcttctgctaacgtgccctcgtgagtgagttttgggtattg

SEQ ID NO: 61556 - DNA, 50 bp, synthetic construct
  source 1..50: mol_type = other DNA
ttttttgagcttggtttgcagttacttaacaacaaacaccacaattacct

SEQ ID NO: 61557 - DNA, 50 bp, synthetic construct
  source 1..50: mol_type = other DNA
tgtgtatagggtgtatagttgtatcagtacaaccgttcaccctctacact

SEQ ID NO: 61558 - DNA, 50 bp, synthetic construct
  source 1..50: mol_type = other DNA
cgcggcttctgagtcagcgtctaaggcaccacgatatcgaagccgccgcc

SEQ ID NO: 61559 - DNA, 50 bp, synthetic construct
  source 1..50: mol_type = other DNA
ggtttgggctatcgcaagtccgacgtgtcggatgttagggattccaaacg

SEQ ID NO: 61560 - DNA, 50 bp, synthetic construct
  source 1..50: mol_type = other DNA
ggaaaccaaccagtctcccccagatatcggggtgtttctgagcagtttcg

SEQ ID NO: 61561 - DNA, 50 bp, synthetic construct
  source 1..50: mol_type = other DNA
ggcatcgcaattatagacgaacctgcagttctgtccatcagcatcctgca

SEQ ID NO: 61562 - DNA, 50 bp, synthetic construct
  source 1..50: mol_type = other DNA
cgaatcaatgacctgcaagattatatcctatgaaacaggcagaatatctg

SEQ ID NO: 61563 - DNA, 50 bp, synthetic construct
  source 1..50: mol_type = other DNA
gcgcattcaggagagcgcctaaaacgcggtaggggctttttgttttggaa

SEQ ID NO: 61564 - DNA, 50 bp, synthetic construct
  source 1..50: mol_type = other DNA
tagtgttcgtttgttccatatagtctgctatattgaacgtaaggacacta

SEQ ID NO: 61565 - DNA, 50 bp, synthetic construct
  source 1..50: mol_type = other DNA
tgctaaatattactttttactatcttaatagtgacaaacaaagtttagca

SEQ ID NO: 61566 - DNA, 50 bp, synthetic construct
  source 1..50: mol_type = other DNA
gggattttaccaaagttcagggaatagagaaccttaattacttattcaat

SEQ ID NO: 61567 - DNA, 50 bp, synthetic construct
  source 1..50: mol_type = other DNA
ttaagcaatgtttgaatgtatgtgaataaaatcgttgaaacatctatcat

SEQ ID NO: 61568 - DNA, 50 bp, synthetic construct
  source 1..50: mol_type = other DNA
aagccactgataaatcaggggcttgaatatgggaactgggagtttgagtt

SEQ ID NO: 61569 - DNA, 50 bp, synthetic construct
  source 1..50: mol_type = other DNA
ttaacgtggatgttggtgagtttttcgaaaaactatacaatcgctcgtaa

SEQ ID NO: 61570 - DNA, 50 bp, synthetic construct
  source 1..50: mol_type = other DNA
tgcgatactaatataagtccaaccaatgaggagtacgtgatagtatcgca

SEQ ID NO: 61571 - DNA, 50 bp, synthetic construct
  source 1..50: mol_type = other DNA
ctaaagttatgtcataacctatacaagttttcttaacgacataactattt

SEQ ID NO: 61572 - DNA, 50 bp, synthetic construct
  source 1..50: mol_type = other DNA
taattattatgcctttaagaaaacttgtatcggttatgacataactctag

SEQ ID NO: 61573 - DNA, 50 bp, synthetic construct
  source 1..50: mol_type = other DNA
aaatatcgagtagtgttattgacatatgttaatatcactactaaatggat

SEQ ID NO: 61574 - DNA, 50 bp, synthetic construct
  source 1..50: mol_type = other DNA
taatgatatatgatgtgttcccataaatgggaactgagaaatcagttccc

SEQ ID NO: 61575 - DNA, 50 bp, synthetic construct
  source 1..50: mol_type = other DNA
tatgattttctcttcttcgaattaaataccactatgaagaattgcgaata

SEQ ID NO: 61576 - DNA, 50 bp, synthetic construct
  source 1..50: mol_type = other DNA
gggattttaccaaatttcagggaatagagaaccttaataaggaaatcaat

SEQ ID NO: 61577 - DNA, 50 bp, synthetic construct
  source 1..50: mol_type = other DNA
actcgcgaggatcggcagggcgggatcccgcgttcgaggaactcgccgag

SEQ ID NO: 61578 - DNA, 50 bp, synthetic construct
  source 1..50: mol_type = other DNA
tcaattggaaaatataaataattttaaaactctcactcttctccatctca

SEQ ID NO: 61579 - DNA, 50 bp, synthetic construct
  source 1..50: mol_type = other DNA
gaactcgtgaaaataaattatcatccattaactgtaattttcaaatcaac

SEQ ID NO: 61580 - DNA, 50 bp, synthetic construct
  source 1..50: mol_type = other DNA
gttatcaattggaaaatataaataatcttcattcttttccaagctataaa

SEQ ID NO: 61581 - DNA, 50 bp, synthetic construct
  source 1..50: mol_type = other DNA
cgacatcaagtttggacaataatgcttatcattgtccaaacttatattta

SEQ ID NO: 61582 - DNA, 50 bp, synthetic construct
  source 1..50: mol_type = other DNA
tggagttgaattgttttttattttaaagcataaacgcttatatgtcgcca

SEQ ID NO: 61583 - DNA, 50 bp, synthetic construct
  source 1..50: mol_type = other DNA
agggtagatgatgaacgattgtactggtttagttggcagggatgtaccct

SEQ ID NO: 61584 - DNA, 50 bp, synthetic construct
  source 1..50: mol_type = other DNA
cgcggccctgcagaactgcggcttcgaagtccacctggccaatggcctgc

SEQ ID NO: 61585 - DNA, 50 bp, synthetic construct
  source 1..50: mol_type = other DNA
caatgtcctcgtccgcgagatcgcggattgcctcacgcctcaggatgccg

SEQ ID NO: 61586 - DNA, 50 bp, synthetic construct
  source 1..50: mol_type = other DNA
catgatccgcgccctcctgtcgcccgaacggcgcgacggcgaggatgacc

SEQ ID NO: 61587 - DNA, 50 bp, synthetic construct
  source 1..50: mol_type = other DNA
ctgttagctaccgatccggttatcgatacacccggcggggtagctcagat

SEQ ID NO: 61588 - DNA, 50 bp, synthetic construct
  source 1..50: mol_type = other DNA
gatgcggccaaggccgcgagaaatctgtagctcgggggaagagcatttcc

SEQ ID NO: 61589 - DNA, 50 bp, synthetic construct
  source 1..50: mol_type = other DNA
tgtttcacctttcggtagaacttctcaacgatataccgaaaggtgcaaca

SEQ ID NO: 61590 - DNA, 50 bp, synthetic construct
  source 1..50: mol_type = other DNA
ctagttcgagtacgaccagcctggtctcagctcagtcggcgtcctcggaa

SEQ ID NO: 61591 - DNA, 50 bp, synthetic construct
  source 1..50: mol_type = other DNA
cggatatcatgaatttcgtaatcttaatgccctgaaatcgttgatatata

SEQ ID NO: 61592 - DNA, 50 bp, synthetic construct
  source 1..50: mol_type = other DNA
gatacaagaccgactcgcgatcatcgatgaggatcgggcggcgatctacc

SEQ ID NO: 61593 - DNA, 50 bp, synthetic construct
  source 1..50: mol_type = other DNA
ggtgcagacaagattgcattaggcccgcctaatgtcttatagtttgaact

SEQ ID NO: 61594 - DNA, 50 bp, synthetic construct
  source 1..50: mol_type = other DNA
actggcaattcaatacttcagtaaaacacttgaaatattatgatgacaga

SEQ ID NO: 61595 - DNA, 50 bp, synthetic construct
  source 1..50: mol_type = other DNA
caaattcaaagttccgtaaaacaaatatctttatagcctaattgaaagtg

SEQ ID NO: 61596 - DNA, 50 bp, synthetic construct
  source 1..50: mol_type = other DNA
cacctgtgtttttagcaggaaaaaatagtatcaaaacaaaaacaacagtg

SEQ ID NO: 61597 - DNA, 50 bp, synthetic construct
  source 1..50: mol_type = other DNA
gcacggcatggagaagaaccgcactaaaatagcagccctcccagaacaac

SEQ ID NO: 61598 - DNA, 50 bp, synthetic construct
  source 1..50: mol_type = other DNA
tctccccatcccctgataacggaatcatccgttttcctatgatggcagcc

SEQ ID NO: 61599 - DNA, 50 bp, synthetic construct
  source 1..50: mol_type = other DNA
tgtgccgagatcggggtgaaggtgctcactcatgcagttgtctccgcagc

SEQ ID NO: 61600 - DNA, 50 bp, synthetic construct
  source 1..50: mol_type = other DNA
atttctcctattgttgggatattttagcataggcccacaatctttgaaag

SEQ ID NO: 61601 - DNA, 50 bp, synthetic construct
  source 1..50: mol_type = other DNA
tgctttatcggatcgtcaaaatgcatgaacgatgaatatcccataaaaca

SEQ ID NO: 61602 - DNA, 50 bp, synthetic construct
  source 1..50: mol_type = other DNA
atctgtcgccaactcatagtactcatgcccgaaatatacccgctaaaaat

SEQ ID NO: 61603 - DNA, 50 bp, synthetic construct
  source 1..50: mol_type = other DNA
tctcggttacttttggcatttgaccaaacaacaaccatgagggtaagaga

SEQ ID NO: 61604 - DNA, 50 bp, synthetic construct
  source 1..50: mol_type = other DNA
ggaggaggcagaactggaggcggatgcgtctgacacagtctgcttcagct

SEQ ID NO: 61605 - DNA, 50 bp, synthetic construct
  source 1..50: mol_type = other DNA
atggttgatgctgttattgtgctgctctatacgataacctcatcaacatc

SEQ ID NO: 61606 - DNA, 50 bp, synthetic construct
  source 1..50: mol_type = other DNA
aaagtctatagctttagggattttttaacgcccccagcgcttaaaactta

SEQ ID NO: 61607 - DNA, 50 bp, synthetic construct
  source 1..50: mol_type = other DNA
atattgtaattagcaatacacactcaaatgtgttatgtttatacaaacaa

SEQ ID NO: 61608 - DNA, 50 bp, synthetic construct
  source 1..50: mol_type = other DNA
agcaacaaatattactaatttatttgaatatatttgttagatgagtgtta

SEQ ID NO: 61609 - DNA, 50 bp, synthetic construct
  source 1..50: mol_type = other DNA
catatttcaaaaaagaataaagcaatgtcttgagaaattgttgaaactct

SEQ ID NO: 61610 - DNA, 50 bp, synthetic construct
  source 1..50: mol_type = other DNA
cgatattgagtggctcatttttgaaataaaaaatataaattaaattattt

SEQ ID NO: 61611 - DNA, 50 bp, synthetic construct
  source 1..50: mol_type = other DNA
gctcctcctttcacagtgataatatacggtattgctgtagagccaggaag

SEQ ID NO: 61612 - DNA, 50 bp, synthetic construct
  source 1..50: mol_type = other DNA
gctatttacgcgttcaaatcgatcatgactaataataacgcccaacacca

SEQ ID NO: 61613 - DNA, 50 bp, synthetic construct
  source 1..50: mol_type = other DNA
attcaacacgctaacaaatcatggcttcatgatttgttcaactgcatcat

SEQ ID NO: 61614 - DNA, 50 bp, synthetic construct
  source 1..50: mol_type = other DNA
tctctcttcttataatcattttctatttgatatatatctaaattcagaaa

SEQ ID NO: 61615 - DNA, 50 bp, synthetic construct
  source 1..50: mol_type = other DNA
tttgctattattactactagtttaataaaactgcatagaaagatacaaaa

SEQ ID NO: 61616 - DNA, 50 bp, synthetic construct
  source 1..50: mol_type = other DNA
tcatatttttacttttgtgtcgattgtttgaaagtacagggtcaaaataa

SEQ ID NO: 61617 - DNA, 50 bp, synthetic construct
  source 1..50: mol_type = other DNA
taataagtcaaaatcgggcgaatcatccttcaaagcctttgatatcatcc

SEQ ID NO: 61618 - DNA, 50 bp, synthetic construct
  source 1..50: mol_type = other DNA
attactataattcgcaaatagaagcaattctatttcaaaactaactaaat

SEQ ID NO: 61619 - DNA, 50 bp, synthetic construct
  source 1..50: mol_type = other DNA
gataggggcatagtcggtgaagtattgcgattaccgaccatggtccggac

SEQ ID NO: 61620 - DNA, 50 bp, synthetic construct
  source 1..50: mol_type = other DNA
ttatatcgataggggcatagtcggtgaagtctacagtcgaacgggttttc

SEQ ID NO: 61621 - DNA, 50 bp, synthetic construct
  source 1..50: mol_type = other DNA
ttgcttttcataaatcgacgataaatttatacataggctataaaaacttc

SEQ ID NO: 61622 - DNA, 50 bp, synthetic construct
  source 1..50: mol_type = other DNA
ttatcagagcagttgatgatgctgatttttatatttactggctaatatat

SEQ ID NO: 61623 - DNA, 50 bp, synthetic construct
  source 1..50: mol_type = other DNA
taaaaataaaattaagctccacttactttaggaggctgttcttttttttg

SEQ ID NO: 61624 - DNA, 50 bp, synthetic construct
  source 1..50: mol_type = other DNA
ggttaccctcgccgtagcccgtgccggcatcgacttcggcgagggtgacc

SEQ ID NO: 61625 - DNA, 50 bp, synthetic construct
  source 1..50: mol_type = other DNA
cttctgaggcatcatcgcggctcaaatgcgccgacctgatcccacaatcg

SEQ ID NO: 61626 - DNA, 50 bp, synthetic construct
  source 1..50: mol_type = other DNA
taacataatatccaccgagtaaaaatttttattggctcgagttcttcttc

SEQ ID NO: 61627 - DNA, 50 bp, synthetic construct
  source 1..50: mol_type = other DNA
aagcgtttatgcgttgtcgtcaccttgctgacgaactggctcaagagcta

SEQ ID NO: 61628 - DNA, 50 bp, synthetic construct
  source 1..50: mol_type = other DNA
tgtcgtcaccttgttggtgtcattaggttgacgccaacatggtgacgaca

SEQ ID NO: 61629 - DNA, 50 bp, synthetic construct
  source 1..50: mol_type = other DNA
ataaaagaaaagctccaggaaggagcaattaaaaggaaacttaatgttaa

SEQ ID NO: 61630 - DNA, 50 bp, synthetic construct
  source 1..50: mol_type = other DNA
tagataatcttgaacgacctgaatcttggtaggtcgagatggattgctac

SEQ ID NO: 61631 - DNA, 50 bp, synthetic construct
  source 1..50: mol_type = other DNA
atatctaaagtcggtaccgcctggttcttctatctacctacttttcgtat

SEQ ID NO: 61632 - DNA, 50 bp, synthetic construct
  source 1..50: mol_type = other DNA
gagcgtcaccctgttggcgtcaacctaattaaaccaacaaggtgacgaca

SEQ ID NO: 61633 - DNA, 50 bp, synthetic construct
  source 1..50: mol_type = other DNA
ccaagccgtgatgagttccggattcgaatccaaagtacgaatacgaaagc

SEQ ID NO: 61634 - DNA, 50 bp, synthetic construct
  source 1..50: mol_type = other DNA
cttcgcccagctcttccttagcctcatcacttagtaagtgctcagaagcc

SEQ ID NO: 61635 - DNA, 50 bp, synthetic construct
  source 1..50: mol_type = other DNA
ggtgcgagcatcgccgccgagtctgcagactcaagatccgcgcttccccg

SEQ ID NO: 61636 - DNA, 50 bp, synthetic construct
  source 1..50: mol_type = other DNA
aggtggggatattgacaagcgcataagtatttatgttataatccccatca

SEQ ID NO: 61637 - DNA, 50 bp, synthetic construct
  source 1..50: mol_type = other DNA
agggattttaccaaagttcagggaattaaccaaacaatcatacagtagat

SEQ ID NO: 61638 - DNA, 50 bp, synthetic construct
  source 1..50: mol_type = other DNA
ggctatgcacttatgctatcaccatttgctgaacacacaaatgaggagcg

SEQ ID NO: 61639 - DNA, 50 bp, synthetic construct
  source 1..50: mol_type = other DNA
ttaaaatcatcgataaaaagtatgatcatagtacattacgatagtgatac

SEQ ID NO: 61640 - DNA, 50 bp, synthetic construct
  source 1..50: mol_type = other DNA
aaaagtatcagtgttcaatatgcagacggtggacgaacactcatcacaac

SEQ ID NO: 61641 - DNA, 50 bp, synthetic construct
  source 1..50: mol_type = other DNA
gatatggttaagattggtggagatgaagaaataaaaattataaccatagg

SEQ ID NO: 61642 - DNA, 50 bp, synthetic construct
  source 1..50: mol_type = other DNA
ataagctgtttagaaaaagttgactttggaaatttacttaaacaaatttc

SEQ ID NO: 61643 - DNA, 50 bp, synthetic construct
  source 1..50: mol_type = other DNA
ttccctgtaataatcaagttcattacccttaattttactattacatggaa

SEQ ID NO: 61644 - DNA, 50 bp, synthetic construct
  source 1..50: mol_type = other DNA
atcagcctgtaatgctataacctatattatttatatctatacagctcgat

SEQ ID NO: 61645 - DNA, 50 bp, synthetic construct
  source 1..50: mol_type = other DNA
tggcgtacattatacactaactgttcccaattggtatagtaagtacgccc

SEQ ID NO: 61646 - DNA, 50 bp, synthetic construct
  source 1..50: mol_type = other DNA
atacagtacaaacgtcaacataaagattgctgcgagcgttactacttgca

SEQ ID NO: 61647 - DNA, 50 bp, synthetic construct
  source 1..50: mol_type = other DNA
gtttttaaaaacggactttcacatatatgagcgtaaacaaaaatattaca

SEQ ID NO: 61648 - DNA, 50 bp, synthetic construct
  source 1..50: mol_type = other DNA
tattttcaatttgttctttcgttatatattatgaaaactgcaatctacct

SEQ ID NO: 61649 - DNA, 50 bp, synthetic construct
  source 1..50: mol_type = other DNA
agtttgtcacataagttaatcggattacctattaacttatgtgacaaact

SEQ ID NO: 61650 - DNA, 50 bp, synthetic construct
  source 1..50: mol_type = other DNA
agctgtccattaaagatcagaagtcaacttttaatctttaatcccactgt

SEQ ID NO: 61651 - DNA, 50 bp, synthetic construct
  source 1..50: mol_type = other DNA
cgacattaagtttggacaataatgctcatcattgtccaaacttatattga

SEQ ID NO: 61652 - DNA, 50 bp, synthetic construct
  source 1..50: mol_type = other DNA
atcacccgcgacggcctgcgcaacctgttttgcaggcagacgtatcactc

SEQ ID NO: 61653 - DNA, 50 bp, synthetic construct
  source 1..50: mol_type = other DNA
ttgtatgcttcaaagcgggctacctgcggcatccgctttctgaccgacta

SEQ ID NO: 61654 - DNA, 50 bp, synthetic construct
  source 1..50: mol_type = other DNA
atgggcggtttatccaacaggtcattactgatgtgtgataaagaagtaat

SEQ ID NO: 61655 - DNA, 50 bp, synthetic construct
  source 1..50: mol_type = other DNA
gtatagcggcaaaagcgtcaaatctgttttcgacttctttgccgcaatta

SEQ ID NO: 61656 - DNA, 50 bp, synthetic construct
  source 1..50: mol_type = other DNA
ttgaacctcatcttcattatagcccaacttagtcagaaaaacttagtcaa

SEQ ID NO: 61657 - DNA, 50 bp, synthetic construct
  source 1..50: mol_type = other DNA
atgttttttgaaaaaagaatattcaaaaatcaaaaaagaaaaaaagaatg

SEQ ID NO: 61658 - DNA, 50 bp, synthetic construct
  source 1..50: mol_type = other DNA
aaaacacgattcgtcccttagagtacagatgaaatattgaacctttggaa

SEQ ID NO: 61659 - DNA, 50 bp, synthetic construct
  source 1..50: mol_type = other DNA
atatttataatttcgtttcatttttaaaaaaacaaaagatacatacatat

SEQ ID NO: 61660 - DNA, 50 bp, synthetic construct
  source 1..50: mol_type = other DNA
tctatgatggttggtgtcctgtctgtaacatggacagaaatggacttgat

SEQ ID NO: 61661 - DNA, 50 bp, synthetic construct
  source 1..50: mol_type = other DNA
ctctcgtactaggagcagcccctttcattctatgtttagaggaacgagaa

SEQ ID NO: 61662 - DNA, 50 bp, synthetic construct
  source 1..50: mol_type = other DNA
atcctcgacggtcgcaagggccttgtcaggcttttgctgccgtcgaggag

SEQ ID NO: 61663 - DNA, 50 bp, synthetic construct
  source 1..50: mol_type = other DNA
gacctcatcgagagcgcggcggacgcatggagcgcgaagacgctgaagag

SEQ ID NO: 61664 - DNA, 50 bp, synthetic construct
  source 1..50: mol_type = other DNA
tggagggcttagaattgattttatgccaagcgtaaaggccgtatgggaat

SEQ ID NO: 61665 - DNA, 50 bp, synthetic construct
  source 1..50: mol_type = other DNA
gggggaaatacatatagcatttgcgcgcaagtaaggctgataacgatatt

SEQ ID NO: 61666 - DNA, 50 bp, synthetic construct
  source 1..50: mol_type = other DNA
gaaatccctacaaaaatgtggctttaaagttacataaatgtgggctgtca

SEQ ID NO: 61667 - DNA, 50 bp, synthetic construct
  source 1..50: mol_type = other DNA
aacatacgaattgactacgccagcatgcaggcataacctgttcgtatggc

SEQ ID NO: 61668 - DNA, 50 bp, synthetic construct
  source 1..50: mol_type = other DNA
ataaaaatagtttggatagcctaccacaagacgggggtttaaatttttcg

SEQ ID NO: 61669 - DNA, 50 bp, synthetic construct
  source 1..50: mol_type = other DNA
aaacactttctaaatcagtaaaaaaaatttttcgaatttaaatccccttt

SEQ ID NO: 61670 - DNA, 50 bp, synthetic construct
  source 1..50: mol_type = other DNA
aaaaggaaaaagcacttttgaaaatgacctcagcggtgcattttccgaac

SEQ ID NO: 61671 - DNA, 50 bp, synthetic construct
  source 1..50: mol_type = other DNA
actcacccattcccgcactttgagcgtccaattggcgggcctgagtcatt

SEQ ID NO: 61672 - DNA, 50 bp, synthetic construct
  source 1..50: mol_type = other DNA
gtgtgagaataccacctgccagtctcgaatggtaggggtgaatatcacac

SEQ ID NO: 61673 - DNA, 50 bp, synthetic construct
  source 1..50: mol_type = other DNA
agtcggcggacagctccagtagccgcgtcgcctggaagcgtccttcgccg

SEQ ID NO: 61674 - DNA, 50 bp, synthetic construct
  source 1..50: mol_type = other DNA
cccccgcctgaagccgcaagggtttcaaccgaagcggcgaccggcctcgg

SEQ ID NO: 61675 - DNA, 50 bp, synthetic construct
  source 1..50: mol_type = other DNA
ttagagtgtcattccgcccccagccggtagagggcgaaatgacactctct

SEQ ID NO: 61676 - DNA, 50 bp, synthetic construct
  source 1..50: mol_type = other DNA
atagttcgcgtcttcgccgatcccgggagccaattcggaacgaaactgcg

SEQ ID NO: 61677 - DNA, 50 bp, synthetic construct
  source 1..50: mol_type = other DNA
cagttcggacttcatgacatacctcctggaagcttatgaagctcgtcgca

SEQ ID NO: 61678 - DNA, 50 bp, synthetic construct
  source 1..50: mol_type = other DNA
cattaattaatccacctcaacatttggattttgaggtggattaaaattcg

SEQ ID NO: 61679 - DNA, 50 bp, synthetic construct
  source 1..50: mol_type = other DNA
gatcgactttggtaacttttattctcctcataacaagcccaactgctatt

SEQ ID NO: 61680 - DNA, 50 bp, synthetic construct
  source 1..50: mol_type = other DNA
cttttgtcctcaatgtgctaatggtaatcttttcacgttattgacaaagg

SEQ ID NO: 61681 - DNA, 50 bp, synthetic construct
  source 1..50: mol_type = other DNA
ccgtaaagcattacccgacttaagcacttaaccagtacaaagcaggtaag

SEQ ID NO: 61682 - DNA, 50 bp, synthetic construct
  source 1..50: mol_type = other DNA
caaacgcagccaacgcgaataggccgacgtcttggtattgggtgttcggc

SEQ ID NO: 61683 - DNA, 50 bp, synthetic construct
  source 1..50: mol_type = other DNA
ttgacgaagtttcgggaggatgtggacgcagtcccaccaaagcccgctaa

SEQ ID NO: 61684 - DNA, 50 bp, synthetic construct
  source 1..50: mol_type = other DNA
ttttctctattcagagagtatgttgccgcgtacatggctcctagtgtgta

SEQ ID NO: 61685 - DNA, 50 bp, synthetic construct
  source 1..50: mol_type = other DNA
gctaaattatttttaatgtcgtcaataaactacatatatgattgtttaaa

SEQ ID NO: 61686 - DNA, 50 bp, synthetic construct
  source 1..50: mol_type = other DNA
gcattccgagtgtagtgtagttagctaaaaacaaaagacaataaagcctt

SEQ ID NO: 61687 - DNA, 50 bp, synthetic construct
  source 1..50: mol_type = other DNA
taaaaagacaattaaggtcacattattaattctttttattactccatttg

SEQ ID NO: 61688 - DNA, 50 bp, synthetic construct
  source 1..50: mol_type = other DNA
atagaataacttgataaagaaaaccccttttccttatctgctgctttgaa

SEQ ID NO: 61689 - DNA, 50 bp, synthetic construct
  source 1..50: mol_type = other DNA
ccttttcctgcatcgcatcatgatccatcttgacccgattccagacccgc

SEQ ID NO: 61690 - DNA, 50 bp, synthetic construct
  source 1..50: mol_type = other DNA
acatatcttattgatggactagtaatgtgtagctgaaaggggagatgaga

SEQ ID NO: 61691 - DNA, 50 bp, synthetic construct
  source 1..50: mol_type = other DNA
aatgtagaaataaatagaaaaattttaatttaaaggagaaagtctactat

SEQ ID NO: 61692 - DNA, 50 bp, synthetic construct
  source 1..50: mol_type = other DNA
atttaataatactattgataattatagaatgcgtgttaggattattgaac

SEQ ID NO: 61693 - DNA, 50 bp, synthetic construct
  source 1..50: mol_type = other DNA
tatttcttatttaaaataataacatgtggaattattttaataagcaaaat

SEQ ID NO: 61694 - DNA, 50 bp, synthetic construct
  source 1..50: mol_type = other DNA
taataatattttatctatcttgttgaaaatagttagataaaataagcgaa

SEQ ID NO: 61695 - DNA, 50 bp, synthetic construct
  source 1..50: mol_type = other DNA
ataaaatgggtacaagaaaagacatcagctatcaccttaaccttgtttat

SEQ ID NO: 61696 - DNA, 50 bp, synthetic construct
  source 1..50: mol_type = other DNA
tatcatagtagtacctctttcaaaatttagtaaagctgggcactatttct

SEQ ID NO: 61697 - DNA, 50 bp, synthetic construct
  source 1..50: mol_type = other DNA
ttgtacgagttgaagcatcagcgaaggcgaaggtgctgctgttcgtacat

SEQ ID NO: 61698 - DNA, 50 bp, synthetic construct
  source 1..50: mol_type = other DNA
catgggctgtttcttaatatctttttaaagatatgaaccctcattatcag

SEQ ID NO: 61699 - DNA, 50 bp, synthetic construct
  source 1..50: mol_type = other DNA
atagcattttcatagtttctagaattttctttttactattttttcaatat

SEQ ID NO: 61700 - DNA, 50 bp, synthetic construct
  source 1..50: mol_type = other DNA
actttctctatttataaatttatcagcatagcattatctatacacctagc

SEQ ID NO: 61701 - DNA, 50 bp, synthetic construct
  source 1..50: mol_type = other DNA
gatgtacaacattgctctttattttcaaatacagaataatgttgcataaa

SEQ ID NO: 61702 - DNA, 50 bp, synthetic construct
  source 1..50: mol_type = other DNA
tttagtacctcattatctctcgctggacggagacgaatcgagaaactaaa

SEQ ID NO: 61703 - DNA, 50 bp, synthetic construct
  source 1..50: mol_type = other DNA
tcacgcagttacaagattcaaacaaattggtgtctgactgaatttagtga

SEQ ID NO: 61704 - DNA, 50 bp, synthetic construct
  source 1..50: mol_type = other DNA
gctccaaactcaggaaaagtatcgtagttgactttacggtactttagagt

SEQ ID NO: 61705 - DNA, 50 bp, synthetic construct
  source 1..50: mol_type = other DNA
cgacctccttaccactccggaatggtactaccaaaaaggaaaggaggtcg

SEQ ID NO: 61706 - DNA, 50 bp, synthetic construct
  source 1..50: mol_type = other DNA
tctccatttccaacattcgctggcgcctttaggctgcgtcccaatagata

SEQ ID NO: 61707 - DNA, 50 bp, synthetic construct
  source 1..50: mol_type = other DNA
agtgcttgaatttcagcacaaatatagccgaatgctcattccatcgcact

SEQ ID NO: 61708 - DNA, 50 bp, synthetic construct
  source 1..50: mol_type = other DNA
cttacagaaattcctcctatatttttaaatattgaagtctaaaattttct

SEQ ID NO: 61709 - DNA, 50 bp, synthetic construct
  source 1..50: mol_type = other DNA
agccccagggcatcggcctgtaagattatagcatacacggccctaacgta

SEQ ID NO: 61710 - DNA, 50 bp, synthetic construct
  source 1..50: mol_type = other DNA
tatttatggaaaggagcatgttgaaataaacaagctactagagccattca

SEQ ID NO: 61711 - DNA, 50 bp, synthetic construct
  source 1..50: mol_type = other DNA
aggtcagcttaacaacatataagtaacctaacaagtcattaatatgccct

SEQ ID NO: 61712 - DNA, 50 bp, synthetic construct
  source 1..50: mol_type = other DNA
ccggccgaggaagcagatcacgggcaccgctcttctggatcgccgccaat

SEQ ID NO: 61713 - DNA, 50 bp, synthetic construct
  source 1..50: mol_type = other DNA
aaaagtaataataactgctgcaactagggaaaatatcattatttacattt

SEQ ID NO: 61714 - DNA, 50 bp, synthetic construct
  source 1..50: mol_type = other DNA
aagaaaatgttagaatctatttgttcacaaattttttgtagtattttgcc

SEQ ID NO: 61715 - DNA, 50 bp, synthetic construct
  source 1..50: mol_type = other DNA
atcgaggagaagacgcgagcccgcgccgtggctatccctgcaagcttgat

SEQ ID NO: 61716 - DNA, 50 bp, synthetic construct
  source 1..50: mol_type = other DNA
ttttgcatttacaataacttgtagcgcttgaagttatgcgccagccgctg

SEQ ID NO: 61717 - DNA, 50 bp, synthetic construct
  source 1..50: mol_type = other DNA
aggggcaaccacagcatttttgtcgtgacataatccgcgtggttgatact

SEQ ID NO: 61718 - DNA, 50 bp, synthetic construct
  source 1..50: mol_type = other DNA
tccatctctgtagttattcaccgtgcgccgtctgtctaatgtatagtgct

SEQ ID NO: 61719 - DNA, 50 bp, synthetic construct
  source 1..50: mol_type = other DNA
aatttttaatgttgacgtgatagtaatgagcgttgataacaaccaaaagg

SEQ ID NO: 61720 - DNA, 50 bp, synthetic construct
  source 1..50: mol_type = other DNA
atctgatttatatggattaaaaacttatatgttcattccactatgtttca

SEQ ID NO: 61721 - DNA, 50 bp, synthetic construct
  source 1..50: mol_type = other DNA
cgcccgcgcagcgtcgacgttcttcgccggacaccgacgcttgcactgcg

SEQ ID NO: 61722 - DNA, 50 bp, synthetic construct
  source 1..50: mol_type = other DNA
attttgtttatgtccttgacaaatcttagggacagagaaaataaaaaact

SEQ ID NO: 61723 - DNA, 50 bp, synthetic construct
  source 1..50: mol_type = other DNA
ggtcaataatttgtgttcctatcctagcgttgatacaaagagtgaaatcg

SEQ ID NO: 61724 - DNA, 50 bp, synthetic construct
  source 1..50: mol_type = other DNA
gagtaagaaaagatgccgattgggaggcgaagcggcatggattgatgaga

SEQ ID NO: 61725 - DNA, 50 bp, synthetic construct
  source 1..50: mol_type = other DNA
tggtatgccagttctcacttttatcctgtctctccgccacttacgaacaa

SEQ ID NO: 61726 - DNA, 50 bp, synthetic construct
  source 1..50: mol_type = other DNA
tcgtttctgaggattggaatctaaaaatagatgccaatcatgatattatc

SEQ ID NO: 61727 - DNA, 50 bp, synthetic construct
  source 1..50: mol_type = other DNA
tagcaattctttataagttggaattgctattcgcctatagaaaatttata

SEQ ID NO: 61728 - DNA, 50 bp, synthetic construct
  source 1..50: mol_type = other DNA
ccgggatcggcggcatgatcgcggcgccgccatctcgccgacttcctcgc

SEQ ID NO: 61729 - DNA, 50 bp, synthetic construct
  source 1..50: mol_type = other DNA
atcagtcgggatgttggctctgctccagcagatcggcaatcatctcgttc

SEQ ID NO: 61730 - DNA, 50 bp, synthetic construct
  source 1..50: mol_type = other DNA
ggcaggtggcatgcgtccgttgcgcgaccagcttgtcaatgcgctacgcc

SEQ ID NO: 61731 - DNA, 50 bp, synthetic construct
  source 1..50: mol_type = other DNA
ggattgcgatgctatcacccactcttggcaaggtattagtattgcacaca

SEQ ID NO: 61732 - DNA, 50 bp, synthetic construct
  source 1..50: mol_type = other DNA
acgtcgtcgacttccgggccgttgaagaacgtttcgccgagaaacgaggt

SEQ ID NO: 61733 - DNA, 50 bp, synthetic construct
  source 1..50: mol_type = other DNA
tcgccgaatagctcaaatacaatgaccattgaatgtagtctattcgggtt

SEQ ID NO: 61734 - DNA, 50 bp, synthetic construct
  source 1..50: mol_type = other DNA
gcctccttaattgtattccttttatagcgctagaaaaagatcatccgcag

SEQ ID NO: 61735 - DNA, 50 bp, synthetic construct
  source 1..50: mol_type = other DNA
gatgtacaaaggtcctattcggaatttttcaaaaatgacgtttcctcatc

SEQ ID NO: 61736 - DNA, 50 bp, synthetic construct
  source 1..50: mol_type = other DNA
tcattgaatgtttaataattagttcagttctttttttaatttttttatgg

SEQ ID NO: 61737 - DNA, 50 bp, synthetic construct
  source 1..50: mol_type = other DNA
tcatctgcatactgtcattcttcattttttagataacagaatcctggtgt

SEQ ID NO: 61738 - DNA, 50 bp, synthetic construct
  source 1..50: mol_type = other DNA
ccaggtcgacgccatcgtcctcgacgacggccatcacctcgtcccactcg

SEQ ID NO: 61739 - DNA, 50 bp, synthetic construct
  source 1..50: mol_type = other DNA
cacaggtggcttattatacaaaatatgcatggaatatgagggtgattagt

SEQ ID NO: 61740 - DNA, 50 bp, synthetic construct
  source 1..50: mol_type = other DNA
tctgcccaccttttttgtacaccggttattccggcaaaaagccgggcaga

SEQ ID NO: 61741 - DNA, 50 bp, synthetic construct
  source 1..50: mol_type = other DNA
cgaatttcataagctcttcctccaattggtggatgagctccatcacatcg

SEQ ID NO: 61742 - DNA, 50 bp, synthetic construct
  source 1..50: mol_type = other DNA
gtgcattattagatatgtctcttcaggattacacccatcttatgatacac

SEQ ID NO: 61743 - DNA, 50 bp, synthetic construct
  source 1..50: mol_type = other DNA
gtgttactatagaataatcacatttcgatgtgccgcatctgtagtaacct

SEQ ID NO: 61744 - DNA, 50 bp, synthetic construct
  source 1..50: mol_type = other DNA
attctggtacgttgaaatcgaagctggcctcgttttgcatccgttgcaaa

SEQ ID NO: 61745 - DNA, 50 bp, synthetic construct
  source 1..50: mol_type = other DNA
agcatcaatgcaaccaacaaggctgcagtcttgaatgtattcgcgaatac

SEQ ID NO: 61746 - DNA, 50 bp, synthetic construct
  source 1..50: mol_type = other DNA
ttttctttttgtaaaattgcaatagatattgaaatttgcggaaaagaatt

SEQ ID NO: 61747 - DNA, 50 bp, synthetic construct
  source 1..50: mol_type = other DNA
ttggacaattcagtatgcgcgattgcagttcggcatgctaagtagtacga

SEQ ID NO: 61748 - DNA, 50 bp, synthetic construct
  source 1..50: mol_type = other DNA
gaatgccttcgccgaattgctcggcggtgaaaaatggggcgaaagtatac

SEQ ID NO: 61749 - DNA, 50 bp, synthetic construct
  source 1..50: mol_type = other DNA
caccccccctgctgaatgggtggatttgcactcaattcctgaacactttt

SEQ ID NO: 61750 - DNA, 50 bp, synthetic construct
  source 1..50: mol_type = other DNA
atctcttggtgggtgtggcgggtttccacccgcccgccaaccgaagcgat

SEQ ID NO: 61751 - DNA, 50 bp, synthetic construct
  source 1..50: mol_type = other DNA
tttgtcggtctcggtaaatgcccgggcgagttttacccgagaccgacact

SEQ ID NO: 61752 - DNA, 50 bp, synthetic construct
  source 1..50: mol_type = other DNA
tttccttctattttaaacaatagggcgtttttgtttggaaatggtatgaa

SEQ ID NO: 61753 - DNA, 50 bp, synthetic construct
  source 1..50: mol_type = other DNA
agttagaaccaatatcttccaattcctccgggtgcgccatttaactaatt

SEQ ID NO: 61754 - DNA, 50 bp, synthetic construct
  source 1..50: mol_type = other DNA
cggtcgaagaaggaggcatcatgaaggaatcatgactggcgattcgacgg

SEQ ID NO: 61755 - DNA, 50 bp, synthetic construct
  source 1..50: mol_type = other DNA
ggttcaatatttcatccgttaagggtacttgaagggacgaacggtgattt

SEQ ID NO: 61756 - DNA, 50 bp, synthetic construct
  source 1..50: mol_type = other DNA
tcattccaaaggttcaatatttcatcccgctgcgagtactctaagagacg

SEQ ID NO: 61757 - DNA, 50 bp, synthetic construct
  source 1..50: mol_type = other DNA
gacaattataaaatgtagtataacatgattgacgacatttaagttgattt

SEQ ID NO: 61758 - DNA, 50 bp, synthetic construct
  source 1..50: mol_type = other DNA
tttttgataaaataggtacaagaaaatttctgtaactttttttgatttcc

SEQ ID NO: 61759 - DNA, 50 bp, synthetic construct
  source 1..50: mol_type = other DNA
ctatatttttgagtatcaatgtttaaaaacgctaaaaatcaaaaataata

SEQ ID NO: 61760 - DNA, 50 bp, synthetic construct
  source 1..50: mol_type = other DNA
aaaagtacctttttcctcaacgagttctcgtatatgaattaactataagg

SEQ ID NO: 61761 - DNA, 50 bp, synthetic construct
  source 1..50: mol_type = other DNA
ttaatatatgtattaggaatgataacgaattatcacaatacttatattaa

SEQ ID NO: 61762 - DNA, 50 bp, synthetic construct
  source 1..50: mol_type = other DNA
aacgactaaaaaaattagggttcaaaaatatgaatgtttttttatttgtt

SEQ ID NO: 61763 - DNA, 50 bp, synthetic construct
  source 1..50: mol_type = other DNA
gagctaagaacgccgattagcattttgcagcttggcagcgtgaatagccc

SEQ ID NO: 61764 - DNA, 50 bp, synthetic construct
  source 1..50: mol_type = other DNA
attgggtgagtagagaaattggagaaatcaaaattgtcttgcaacccaat

SEQ ID NO: 61765 - DNA, 50 bp, synthetic construct
  source 1..50: mol_type = other DNA
atcccactcactgtgttccgcaaaatttctcggcatttagtgtgtgcgca

SEQ ID NO: 61766 - DNA, 50 bp, synthetic construct
  source 1..50: mol_type = other DNA
ttttgtatcccatttcctctccctccagtgagaggaaatgagaaactaaa

SEQ ID NO: 61767 - DNA, 50 bp, synthetic construct
  source 1..50: mol_type = other DNA
tattatctcgatcagaaatctttctagaacgctatcatctaaacctaaat

SEQ ID NO: 61768 - DNA, 50 bp, synthetic construct
  source 1..50: mol_type = other DNA
ggttaattcaatatttacaaagccaaggtattgatagaaaagagctgccg

SEQ ID NO: 61769 - DNA, 50 bp, synthetic construct
  source 1..50: mol_type = other DNA
caattaatatcccacaatgacattaaaacgccatgatgcgatcgagatcg

SEQ ID NO: 61770 - DNA, 50 bp, synthetic construct
  source 1..50: mol_type = other DNA
cgacaaccctggaagagcagcaaggcgatgctgctcgattacgcatgttg

SEQ ID NO: 61771 - DNA, 50 bp, synthetic construct
  source 1..50: mol_type = other DNA
aaaaaagccaagttgccaagtagcaacatacttgccaatcatacttgcta

SEQ ID NO: 61772 - DNA, 50 bp, synthetic construct
  source 1..50: mol_type = other DNA
agtttactgtatgttggctcgtttcaaaagaagacaaaacacaaaaaacc

SEQ ID NO: 61773 - DNA, 50 bp, synthetic construct
  source 1..50: mol_type = other DNA
cttaaaaaatcaaaatattagtaaaatcattttaattgctatttttttat

SEQ ID NO: 61774 - DNA, 50 bp, synthetic construct
  source 1..50: mol_type = other DNA
gccttcgcggtgatcgagcacggcaaggcgtcggagatcgacgccaacgg

SEQ ID NO: 61775 - DNA, 50 bp, synthetic construct
  source 1..50: mol_type = other DNA
gggtgccgacattgtcgaacaggtcgttctggacgagctgttcggcccca

SEQ ID NO: 61776 - DNA, 50 bp, synthetic construct
  source 1..50: mol_type = other DNA
acagcattttaacatggttgcataattagctgactctcctaaaatgtaat

SEQ ID NO: 61777 - DNA, 50 bp, synthetic construct
  source 1..50: mol_type = other DNA
ggggagaattgtctcgtggaagccccgagtgccacgagacggaggcgacg

SEQ ID NO: 61778 - DNA, 50 bp, synthetic construct
  source 1..50: mol_type = other DNA
acaacaaaagatttaagttgtggtagcaaactagaaaagtctttaagtgt

SEQ ID NO: 61779 - DNA, 50 bp, synthetic construct
  source 1..50: mol_type = other DNA
ctccattcggatttattaaaaaaggaacatacattctatttttgatggag

SEQ ID NO: 61780 - DNA, 50 bp, synthetic construct
  source 1..50: mol_type = other DNA
gtaagttattagagagttgtaattaggactacacatctcttatgataaac

SEQ ID NO: 61781 - DNA, 50 bp, synthetic construct
  source 1..50: mol_type = other DNA
gaaacgttatcataatataataccgaggtataatataggtgtaaggtttg

SEQ ID NO: 61782 - DNA, 50 bp, synthetic construct
  source 1..50: mol_type = other DNA
cagagctttctgcgaatttaaaggaatgtgagaattcggagaactaatac

SEQ ID NO: 61783 - DNA, 50 bp, synthetic construct
  source 1..50: mol_type = other DNA
atgttgtaataagcgtcacacactcaagtgtgttatgcttaaacaaacaa

SEQ ID NO: 61784 - DNA, 50 bp, synthetic construct
  source 1..50: mol_type = other DNA
gggctggcgggatttgaacccacgaccagggccaggtcggcccgcagcag

SEQ ID NO: 61785 - DNA, 50 bp, synthetic construct
  source 1..50: mol_type = other DNA
agcgaatcatgattttgatcccgaaactgggagggaagtcatgagccgac

SEQ ID NO: 61786 - DNA, 50 bp, synthetic construct
  source 1..50: mol_type = other DNA
atgggaaactaaatatattgtgcaattatataatacgtatagttgaattt

SEQ ID NO: 61787 - DNA, 50 bp, synthetic construct
  source 1..50: mol_type = other DNA
tttttctatagtgtttaacaaggaacgccttgtataacactatagaacct

SEQ ID NO: 61788 - DNA, 50 bp, synthetic construct
  source 1..50: mol_type = other DNA
gccttgagcaggacggcggggtcggccgaccgacacgtcgagcaggtcgc

SEQ ID NO: 61789 - DNA, 50 bp, synthetic construct
  source 1..50: mol_type = other DNA
tagagcgcccggcgcgccggatcggatgatgaagcgcgccgccatctact

SEQ ID NO: 61790 - DNA, 50 bp, synthetic construct
  source 1..50: mol_type = other DNA
actgctgtaatacaaatttccattttatgcaattattgtattacagcatt

SEQ ID NO: 61791 - DNA, 50 bp, synthetic construct
  source 1..50: mol_type = other DNA
aacattatgagcctcttcaatcctcaggatcagaataaattcatgctgtt

SEQ ID NO: 61792 - DNA, 50 bp, synthetic construct
  source 1..50: mol_type = other DNA
actcttcatcattcgttcgctgcttcagcagcgccgaccgatcgagcccg

SEQ ID NO: 61793 - DNA, 50 bp, synthetic construct
  source 1..50: mol_type = other DNA
gtcttgaccgcttcgatcaggacccgggggcctcccccccgcccccaccc

SEQ ID NO: 61794 - DNA, 50 bp, synthetic construct
  source 1..50: mol_type = other DNA
ttcgcaaatgttcccagattatacaataggaacatttacaaatctcaaaa

SEQ ID NO: 61795 - DNA, 50 bp, synthetic construct
  source 1..50: mol_type = other DNA
gctaataaaagagaacagtgctgtcaaccacacgcctcttttcggggagt

SEQ ID NO: 61796 - DNA, 50 bp, synthetic construct
  source 1..50: mol_type = other DNA
aggcatatgtataatcccgtaatcttgtccacgtcatgatctgaagaaac

SEQ ID NO: 61797 - DNA, 50 bp, synthetic construct
  source 1..50: mol_type = other DNA
ctaaaaaatgataaaatgggtacaagagtgagagttttactatccttgat

SEQ ID NO: 61798 - DNA, 50 bp, synthetic construct
  source 1..50: mol_type = other DNA
ctacttatctattcgtaaaagaagatcattttttaggaaattttgaaaga

SEQ ID NO: 61799 - DNA, 50 bp, synthetic construct
  source 1..50: mol_type = other DNA
tgtctacttatttgacattagtccaataccaaatggacaaaaagaggacc

SEQ ID NO: 61800 - DNA, 50 bp, synthetic construct
  source 1..50: mol_type = other DNA
attaaaaagatttgaaaggaaataattatcatgtaaccttattaattaaa

SEQ ID NO: 61801 - DNA, 50 bp, synthetic construct
  source 1..50: mol_type = other DNA
aatatagctttgtcattgtatcctcaggtcggaaatagcaaagggatcat

SEQ ID NO: 61802 - DNA, 50 bp, synthetic construct
  source 1..50: mol_type = other DNA
tttagtttctcgtttcttcttcttccagcgagagataacgaggtactaaa

SEQ ID NO: 61803 - DNA, 50 bp, synthetic construct
  source 1..50: mol_type = other DNA
agttgcacttttttagctatagtagaagctatatctataaaagtgcaact

SEQ ID NO: 61804 - DNA, 50 bp, synthetic construct
  source 1..50: mol_type = other DNA
cggtcgcgtccgcccatcgtcctcgcgcggacgcgggcaccccgcgaccc

SEQ ID NO: 61805 - DNA, 50 bp, synthetic construct
  source 1..50: mol_type = other DNA
cgtctcggcgttcgagctgttctccacggaaggagggcaacgatgagcat

SEQ ID NO: 61806 - DNA, 50 bp, synthetic construct
  source 1..50: mol_type = other DNA
tgggggatgtcatgtctatctctgatcagcgaagcccccgccagcagcga

SEQ ID NO: 61807 - DNA, 50 bp, synthetic construct
  source 1..50: mol_type = other DNA
caaagtcgttcatccatacattcctttcgattgcattgagaacgaatgaa

SEQ ID NO: 61808 - DNA, 50 bp, synthetic construct
  source 1..50: mol_type = other DNA
atatgccgctggggtatcggatggcggcaaccgaaagcaaaatggatgcg

SEQ ID NO: 61809 - DNA, 50 bp, synthetic construct
  source 1..50: mol_type = other DNA
gactacagcagatgcacctcagaccaatccggaatacagccgtgatacaa

SEQ ID NO: 61810 - DNA, 50 bp, synthetic construct
  source 1..50: mol_type = other DNA
aatcttagcgcataagttggaaaaggcaggctctgcgatggtcagagatg

SEQ ID NO: 61811 - DNA, 50 bp, synthetic construct
  source 1..50: mol_type = other DNA
agacaacgccatatgccgctggggtacagtatgggtaactcatttatatt

SEQ ID NO: 61812 - DNA, 50 bp, synthetic construct
  source 1..50: mol_type = other DNA
taaacaggaacagagaaaacgcagggctgcgggtagccgcctactgccga

SEQ ID NO: 61813 - DNA, 50 bp, synthetic construct
  source 1..50: mol_type = other DNA
agtagttcttattgcctcacatttacaggtgtggggtattgaagactact

SEQ ID NO: 61814 - DNA, 50 bp, synthetic construct
  source 1..50: mol_type = other DNA
tactgcctcgacaacgagaagtgatcacgattccacttgtaacaatcgat

SEQ ID NO: 61815 - DNA, 50 bp, synthetic construct
  source 1..50: mol_type = other DNA
caaacataactaaaactaaagatatatatgataacatttagtaaaaattt

SEQ ID NO: 61816 - DNA, 50 bp, synthetic construct
  source 1..50: mol_type = other DNA
tataccatattatttattcaaatataacacaaaataattgtgacggaata

SEQ ID NO: 61817 - DNA, 50 bp, synthetic construct
  source 1..50: mol_type = other DNA
agtacaaattaattaataaacattaatatcagtattaatgcacgaacaat

SEQ ID NO: 61818 - DNA, 50 bp, synthetic construct
  source 1..50: mol_type = other DNA
aggggaagacccccctccctacttcgcggtcgtggtggcggtcgccccct

SEQ ID NO: 61819 - DNA, 50 bp, synthetic construct
  source 1..50: mol_type = other DNA
atgaagtctggcgggaggacgaccatattttgtctcctgctatggttgat

SEQ ID NO: 61820 - DNA, 50 bp, synthetic construct
  source 1..50: mol_type = other DNA
ttgtaggaaaacaaaaagataaccagagtaatcgtttttaaaatagattc

SEQ ID NO: 61821 - DNA, 50 bp, synthetic construct
  source 1..50: mol_type = other DNA
ggtcaaaagcgtgcgttttgattcggctaacccgtgggaatatttagatg

SEQ ID NO: 61822 - DNA, 50 bp, synthetic construct
  source 1..50: mol_type = other DNA
cagatgaacgtccgggattccgaggtctttttgacattgagtttcatcag

SEQ ID NO: 61823 - DNA, 50 bp, synthetic construct
  source 1..50: mol_type = other DNA
cgttgatgaattcgacttcgccatcgatgaagaccatgtccgcatctgcc

SEQ ID NO: 61824 - DNA, 50 bp, synthetic construct
  source 1..50: mol_type = other DNA
tcttttgccaactgtggcttgccttaccgaataacacaccgctcaaaaga

SEQ ID NO: 61825 - DNA, 50 bp, synthetic construct
  source 1..50: mol_type = other DNA
tgagaccaacctttcttcagaaggtactcaatgatctcgggtatataatt

SEQ ID NO: 61826 - DNA, 50 bp, synthetic construct
  source 1..50: mol_type = other DNA
gtacattctctctcagtccaatggatagtgataactttcattctatgtta

SEQ ID NO: 61827 - DNA, 50 bp, synthetic construct
  source 1..50: mol_type = other DNA
taaacataaaaggtaaataataccaaggcaatattaacctttttgaggac

SEQ ID NO: 61828 - DNA, 50 bp, synthetic construct
  source 1..50: mol_type = other DNA
accatctgaaactggaggtgtatttaaatacaccacctaaagcgatacaa

SEQ ID NO: 61829 - DNA, 50 bp, synthetic construct
  source 1..50: mol_type = other DNA
tagttctacatcatgagctttacacctgaaaaaatcagggcttctaagtg

SEQ ID NO: 61830 - DNA, 50 bp, synthetic construct
  source 1..50: mol_type = other DNA
aattagttgtgcctttaagaaaacatcggttatgacataactctagaatc

SEQ ID NO: 61831 - DNA, 50 bp, synthetic construct
  source 1..50: mol_type = other DNA
actagatattaatttatctaatatttttatcagtattattaatagcaagt

SEQ ID NO: 61832 - DNA, 50 bp, synthetic construct
  source 1..50: mol_type = other DNA
gcatctttgtcgctattagtataccattatatcaatagctacaaaaatta

SEQ ID NO: 61833 - DNA, 50 bp, synthetic construct
  source 1..50: mol_type = other DNA
gtgtagtcccttgtaaactgcactttaggtcagtttacaaggaactacac

SEQ ID NO: 61834 - DNA, 50 bp, synthetic construct
  source 1..50: mol_type = other DNA
tagtaattccaatccatttattcctaggattaaatggggtaaatctaatt

SEQ ID NO: 61835 - DNA, 50 bp, synthetic construct
  source 1..50: mol_type = other DNA
tttggcatctcgtttcttcttcttccaacgagagaaaacgagggactaaa

SEQ ID NO: 61836 - DNA, 50 bp, synthetic construct
  source 1..50: mol_type = other DNA
atatacttttgatatttaatttttataaaaatttcattttataaaaataa

SEQ ID NO: 61837 - DNA, 50 bp, synthetic construct
  source 1..50: mol_type = other DNA
tgcgcattcaggagagcgcctaaaacggtaggggctttttgttttggaaa

SEQ ID NO: 61838 - DNA, 50 bp, synthetic construct
  source 1..50: mol_type = other DNA
agggtagatgatgagcgattatactggtttaattagcagggatgtaacca

SEQ ID NO: 61839 - DNA, 50 bp, synthetic construct
  source 1..50: mol_type = other DNA
tataagtttggaaaatgatgagcaagtgcatagcgttgatacaaagagtg

SEQ ID NO: 61840 - DNA, 50 bp, synthetic construct
  source 1..50: mol_type = other DNA
tcgtggctcgcggcagagtgacgctagcgcaattgtgagaactgctgtcc

SEQ ID NO: 61841 - DNA, 50 bp, synthetic construct
  source 1..50: mol_type = other DNA
atgttaatttaaatgatattatggataatcaataaaattatattttacat

SEQ ID NO: 61842 - DNA, 50 bp, synthetic construct
  source 1..50: mol_type = other DNA
attcccatacggcctttacgcttggcataaaatcaattctaagccctcca

SEQ ID NO: 61843 - DNA, 50 bp, synthetic construct
  source 1..50: mol_type = other DNA
agaacttattacccatacctgcaaatttacaggtatgtataatatggaat

SEQ ID NO: 61844 - DNA, 50 bp, synthetic construct
  source 1..50: mol_type = other DNA
aatatgttttcctgtcatgggcaagtcgaaaatacccatgagaaaataga

SEQ ID NO: 61845 - DNA, 50 bp, synthetic construct
  source 1..50: mol_type = other DNA
tttattatcctaatatattaagattatttttaattgtcaagcgctaaata

SEQ ID NO: 61846 - DNA, 50 bp, synthetic construct
  source 1..50: mol_type = other DNA
tatctataattaaatcgaaaaagttaactgcttcctcttcattaacgaca

SEQ ID NO: 61847 - DNA, 50 bp, synthetic construct
  source 1..50: mol_type = other DNA
tgcaataacagcaaatatacaacaataatagtataagtactcttccccta

SEQ ID NO: 61848 - DNA, 50 bp, synthetic construct
  source 1..50: mol_type = other DNA
gattatatactcttttgactcataatgttatatccaaaaggtatatggct

SEQ ID NO: 61849 - DNA, 50 bp, synthetic construct
  source 1..50: mol_type = other DNA
agaataagaattaaataaattaaagcgaaaaaaaatgtgattcttacaaa

SEQ ID NO: 61850 - DNA, 50 bp, synthetic construct
  source 1..50: mol_type = other DNA
tggtgcaataaatggtcggggagagatttttgcggtaagatactgaaatt

SEQ ID NO: 61851 - DNA, 50 bp, synthetic construct
  source 1..50: mol_type = other DNA
tatttaccctaccccgcggggccccgggcacccgagagatactataccta

SEQ ID NO: 61852 - DNA, 50 bp, synthetic construct
  source 1..50: mol_type = other DNA
ccggcgcggattgacgcgctcacgccgcaacgcgctgggcgacgcgccgg

SEQ ID NO: 61853 - DNA, 50 bp, synthetic construct
  source 1..50: mol_type = other DNA
ctcaagtggtgcgtattatacatagctagatattagaggcatgtgttgag

SEQ ID NO: 61854 - DNA, 50 bp, synthetic construct
  source 1..50: mol_type = other DNA
ggtttgcattacttcctttatgttaatagttaaatgaggtaattcaaacc

SEQ ID NO: 61855 - DNA, 50 bp, synthetic construct
  source 1..50: mol_type = other DNA
aagtctgtagcaacagattctagttgtgacccatctaattcaccaacctt

SEQ ID NO: 61856 - DNA, 50 bp, synthetic construct
  source 1..50: mol_type = other DNA
gacgttaaaacgtataattttgtgaagcggcgcttagatgttgtattctc

SEQ ID NO: 61857 - DNA, 50 bp, synthetic construct
  source 1..50: mol_type = other DNA
tctgtgatgaataacttacagagaggtcactgtaacgggactatgacagc

SEQ ID NO: 61858 - DNA, 50 bp, synthetic construct
  source 1..50: mol_type = other DNA
cgccctgcaaatattcttttgccaaatcaggaaattgtaacttacaggct

SEQ ID NO: 61859 - DNA, 50 bp, synthetic construct
  source 1..50: mol_type = other DNA
gcagcgccgcgctttccaaagtaaaaaaacggcagaaagcgcgggaactg

SEQ ID NO: 61860 - DNA, 50 bp, synthetic construct
  source 1..50: mol_type = other DNA
tcgcaatccggcgctctcgccgcgaatgcggcttgagcgcagtcatgcgg

SEQ ID NO: 61861 - DNA, 50 bp, synthetic construct
  source 1..50: mol_type = other DNA
catgaagtaccccgttcaatctgctctgagatgccgctactgcggacatg

SEQ ID NO: 61862 - DNA, 50 bp, synthetic construct
  source 1..50: mol_type = other DNA
taacaattacggcatatacagtccatggaaaatcaatgaattttagaggt

SEQ ID NO: 61863 - DNA, 50 bp, synthetic construct
  source 1..50: mol_type = other DNA
gttaaggtataaggcatggtaatcggtgataagttgcctggttaaaacac

SEQ ID NO: 61864 - DNA, 50 bp, synthetic construct
  source 1..50: mol_type = other DNA
gcaggagaacattatgataacttttgaaaggtatcgcagattgtacttgc

SEQ ID NO: 61865 - DNA, 50 bp, synthetic construct
  source 1..50: mol_type = other DNA
atatcatcatcattttcttcttctgaatatcttacggatgattccgtaat

SEQ ID NO: 61866 - DNA, 50 bp, synthetic construct
  source 1..50: mol_type = other DNA
acgtgttccactgttttgtacggaataaaaagaaaaagccgctgacacgt

SEQ ID NO: 61867 - DNA, 50 bp, synthetic construct
  source 1..50: mol_type = other DNA
gaagttcgattgactctgaaagctctattggtatgagtaatacgacattg

SEQ ID NO: 61868 - DNA, 50 bp, synthetic construct
  source 1..50: mol_type = other DNA
aattagtctttgcaaataacctttgaatagtttatacggaaacctttatc

SEQ ID NO: 61869 - DNA, 50 bp, synthetic construct
  source 1..50: mol_type = other DNA
catggatctcaacagctttagtggataacggcttgctgccgaattgcatg

SEQ ID NO: 61870 - DNA, 50 bp, synthetic construct
  source 1..50: mol_type = other DNA
ttatgcctttaaggaaacctaactaaagtattgtatcggttatgacataa

SEQ ID NO: 61871 - DNA, 50 bp, synthetic construct
  source 1..50: mol_type = other DNA
tcagaagtgcagcgaaagggaaaaatttttcctttcactgataaatttgc

SEQ ID NO: 61872 - DNA, 50 bp, synthetic construct
  source 1..50: mol_type = other DNA
ttggacactggttcgagtaagaacgtctttttgtcggcctgttgcaagat

SEQ ID NO: 61873 - DNA, 50 bp, synthetic construct
  source 1..50: mol_type = other DNA
gccgccattcggattttctggacatgaaacagttatttccgaatgatcgt

SEQ ID NO: 61874 - DNA, 50 bp, synthetic construct
  source 1..50: mol_type = other DNA
ttcccattatacctatcagcaatcaccgaacctgattctcataacttgat

SEQ ID NO: 61875 - DNA, 50 bp, synthetic construct
  source 1..50: mol_type = other DNA
taaaatttgagagaggaaagtttcccaaaagtttcagaaagtaatttttt

SEQ ID NO: 61876 - DNA, 50 bp, synthetic construct
  source 1..50: mol_type = other DNA
cccaactgagctagccccccacaactacgtgggccctgaactcacagtct

SEQ ID NO: 61877 - DNA, 50 bp, synthetic construct
  source 1..50: mol_type = other DNA
tgtttattctttataaactttgcctggaccaagtttatgaaggatcaaca

SEQ ID NO: 61878 - DNA, 50 bp, synthetic construct
  source 1..50: mol_type = other DNA
tgctgaccgattccgtggaaacccattagacacgtttaaatacaccacct

SEQ ID NO: 61879 - DNA, 50 bp, synthetic construct
  source 1..50: mol_type = other DNA
aacctgttaaataatcaggctgttgcattagccataacgtttataagttc

SEQ ID NO: 61880 - DNA, 50 bp, synthetic construct
  source 1..50: mol_type = other DNA
tcaaaaaagcacttgacaaaacgcttctgcccggtggagtgcataatttt

SEQ ID NO: 61881 - DNA, 50 bp, synthetic construct
  source 1..50: mol_type = other DNA
ttcctccctattttgtaggttttatgcccctttatcaaaatatggaggtt

SEQ ID NO: 61882 - DNA, 50 bp, synthetic construct
  source 1..50: mol_type = other DNA
caatagctaaaaaaaccgcatcacttagtgatgcggtttttaaactacgg

SEQ ID NO: 61883 - DNA, 50 bp, synthetic construct
  source 1..50: mol_type = other DNA
aaaggttcggattttcattgtttggtaaagcaatccaaatccgaaccatt

SEQ ID NO: 61884 - DNA, 50 bp, synthetic construct
  source 1..50: mol_type = other DNA
gcatctttgctttatcctagataatttgtcaagataaaaaatcaagatgc

SEQ ID NO: 61885 - DNA, 50 bp, synthetic construct
  source 1..50: mol_type = other DNA
tttcctttgcataaaaagaagagaaggatctgcttttccaccacaggcac

SEQ ID NO: 61886 - DNA, 50 bp, synthetic construct
  source 1..50: mol_type = other DNA
catcctctttttttattatctaaataataatataataagaaaagctgatg

SEQ ID NO: 61887 - DNA, 50 bp, synthetic construct
  source 1..50: mol_type = other DNA
aagtaaagaattacctggtatagaaaaattacgtgtgaaagcctttactt

SEQ ID NO: 61888 - DNA, 50 bp, synthetic construct
  source 1..50: mol_type = other DNA
atataatagtataaaataatattaaaaaatatttttctattcgatttcta

SEQ ID NO: 61889 - DNA, 50 bp, synthetic construct
  source 1..50: mol_type = other DNA
atttcatagaaaactatatatttcaagaaataaacagataatcataaaat

SEQ ID NO: 61890 - DNA, 50 bp, synthetic construct
  source 1..50: mol_type = other DNA
ttaccacttagttattagtgacaaaacttgcagttttaaataaagcacaa

SEQ ID NO: 61891 - DNA, 50 bp, synthetic construct
  source 1..50: mol_type = other DNA
taaatatcatagaaaaccgtatcattttcagatgctgcataaagtgcttt

SEQ ID NO: 61892 - DNA, 50 bp, synthetic construct
  source 1..50: mol_type = other DNA
actacacatatcgaaaacttttacatggttaaatattcggattctatagg

SEQ ID NO: 61893 - DNA, 50 bp, synthetic construct
  source 1..50: mol_type = other DNA
atattacaatcaaacaaaatgacaaatatcaacttataggaggattagat

SEQ ID NO: 61894 - DNA, 50 bp, synthetic construct
  source 1..50: mol_type = other DNA
ctatcttgctgattatttccaaatattttgtgaaataataaacctgttac

SEQ ID NO: 61895 - DNA, 50 bp, synthetic construct
  source 1..50: mol_type = other DNA
gattcgtcagggaaacatgcaccaggtaatggacttttccaatttgacat

SEQ ID NO: 61896 - DNA, 50 bp, synthetic construct
  source 1..50: mol_type = other DNA
cggatgagggcatctcagcaaccaatttgcccatgaaatcaacaaatcta

SEQ ID NO: 61897 - DNA, 50 bp, synthetic construct
  source 1..50: mol_type = other DNA
ttttttagttttatttgtggtacgctccctatcagtgaatttgctaaaaa

SEQ ID NO: 61898 - DNA, 50 bp, synthetic construct
  source 1..50: mol_type = other DNA
agtttggacaatgataagcaagttgagacggtagcacttttgtccaaaat

SEQ ID NO: 61899 - DNA, 50 bp, synthetic construct
  source 1..50: mol_type = other DNA
ttgtagcactaattctaggagtttttcaactcgtacaagcagtgataccg

SEQ ID NO: 61900 - DNA, 50 bp, synthetic construct
  source 1..50: mol_type = other DNA
ttactatgaacacattgatttctttaatgaagaagaagctagtgtagtaa

SEQ ID NO: 61901 - DNA, 50 bp, synthetic construct
  source 1..50: mol_type = other DNA
attaagtgttctccttaattctattaacaacttgtcaaggactttctaat

SEQ ID NO: 61902 - DNA, 50 bp, synthetic construct
  source 1..50: mol_type = other DNA
tcagttacttcaatcactaaagaaaagtgctttccttttctcatactaac

SEQ ID NO: 61903 - DNA, 50 bp, synthetic construct
  source 1..50: mol_type = other DNA
tgattattaaaaagagatataaagaacttataatctcttaatatttatgc

SEQ ID NO: 61904 - DNA, 50 bp, synthetic construct
  source 1..50: mol_type = other DNA
ctccttttcttcccaaaaaaaccttttcaattttttaagctaaaaatcta

SEQ ID NO: 61905 - DNA, 50 bp, synthetic construct
  source 1..50: mol_type = other DNA
tttggtatctcgtttcttcttcttccaacgagagaaaatgaggaactaaa

SEQ ID NO: 61906 - DNA, 50 bp, synthetic construct
  source 1..50: mol_type = other DNA
taaatttttgcatgaaaagttaaattttagtcttttctgtaaaaaagtta

SEQ ID NO: 61907 - DNA, 50 bp, synthetic construct
  source 1..50: mol_type = other DNA
ttggatatgtcatcaaagatggcttgtttccaatgacaacacatatagaa

SEQ ID NO: 61908 - DNA, 50 bp, synthetic construct
  source 1..50: mol_type = other DNA
tcctgacctgtgcgttctcgacgtcagcgtcaccagcgcaaccagtaaag

SEQ ID NO: 61909 - DNA, 50 bp, synthetic construct
  source 1..50: mol_type = other DNA
gaataatgtgatgtaaatcacccttaacctctaaaatcctctcagaattc

SEQ ID NO: 61910 - DNA, 50 bp, synthetic construct
  source 1..50: mol_type = other DNA
ttttggcaagattacacagcgatttaatctgctgccgaatacggcccaaa

SEQ ID NO: 61911 - DNA, 50 bp, synthetic construct
  source 1..50: mol_type = other DNA
cgtgtttcgatgggtgtataatattaagtatgtcaacccattattactaa

SEQ ID NO: 61912 - DNA, 50 bp, synthetic construct
  source 1..50: mol_type = other DNA
gattgaattctcgccagcgattcgacttggcgttacacgaaaattcaaga

SEQ ID NO: 61913 - DNA, 50 bp, synthetic construct
  source 1..50: mol_type = other DNA
aatttttcaataatccgccacagcatgttgaggtggattaatttataatg

SEQ ID NO: 61914 - DNA, 50 bp, synthetic construct
  source 1..50: mol_type = other DNA
ggagaataggctggtgacgtcggaacaccttattcgcaagcccacattgg

SEQ ID NO: 61915 - DNA, 50 bp, synthetic construct
  source 1..50: mol_type = other DNA
aggtagatattttgcggggcccggtacctcgctgcacaaatgatctgggc

SEQ ID NO: 61916 - DNA, 50 bp, synthetic construct
  source 1..50: mol_type = other DNA
aacagaaattcactttctaccttttataaggtagagtttttcattcaatg

SEQ ID NO: 61917 - DNA, 50 bp, synthetic construct
  source 1..50: mol_type = other DNA
aacggttcggatttggattgccttgccaggcgcaccaaaccaatataatc

SEQ ID NO: 61918 - DNA, 50 bp, synthetic construct
  source 1..50: mol_type = other DNA
taaaggtggtgcttacgcgccgcacaaattatgcaaaagctatcccttta

SEQ ID NO: 61919 - DNA, 50 bp, synthetic construct
  source 1..50: mol_type = other DNA
ccgtggtgttgggcaagccagtcgggcggcgggctcaacccacagctgca

SEQ ID NO: 61920 - DNA, 50 bp, synthetic construct
  source 1..50: mol_type = other DNA
tgagggtctgttgtcaataacagactcatgttatttacaacagacctcag

SEQ ID NO: 61921 - DNA, 50 bp, synthetic construct
  source 1..50: mol_type = other DNA
gagagttttttgagctaacgaatgaacattctacccctttttagctgaga

SEQ ID NO: 61922 - DNA, 50 bp, synthetic construct
  source 1..50: mol_type = other DNA
tttttcttaaaaaaacctcacttattaatcaacggtttcatttatatttg

SEQ ID NO: 61923 - DNA, 50 bp, synthetic construct
  source 1..50: mol_type = other DNA
atatgtgtctggacgtgggcattggaaataacctcattgctcaggcagtt

SEQ ID NO: 61924 - DNA, 50 bp, synthetic construct
  source 1..50: mol_type = other DNA
taagcgggagaagagcgataaccccactcatatcattgttctcctgttca

SEQ ID NO: 61925 - DNA, 50 bp, synthetic construct
  source 1..50: mol_type = other DNA
ggaatacgccatcgggactatcgcggaaatgactgccgaatgcgaatcgg

SEQ ID NO: 61926 - DNA, 50 bp, synthetic construct
  source 1..50: mol_type = other DNA
ggattagttgacagtaatgattgacttcaatcagggctgtaaacatgccg

SEQ ID NO: 61927 - DNA, 50 bp, synthetic construct
  source 1..50: mol_type = other DNA
actagcagcttcatatcttcggactattcaccaagtattgaccatctagc

SEQ ID NO: 61928 - DNA, 50 bp, synthetic construct
  source 1..50: mol_type = other DNA
aatatggacgggcaaaaaagtggatatcccatttccgacgggaatatttg

SEQ ID NO: 61929 - DNA, 50 bp, synthetic construct
  source 1..50: mol_type = other DNA
gttgtaaatgatactcgtggaatacggctccggcggcgggtgccgacgac

SEQ ID NO: 61930 - DNA, 50 bp, synthetic construct
  source 1..50: mol_type = other DNA
gctttctaaattcggcatataacgcggaaaattcaccgcatccagaattt

SEQ ID NO: 61931 - DNA, 50 bp, synthetic construct
  source 1..50: mol_type = other DNA
ggtttcgacaccaagaatcgaactcgtgatagattcagactatcgttcaa

SEQ ID NO: 61932 - DNA, 50 bp, synthetic construct
  source 1..50: mol_type = other DNA
agtcccttgtaaactgtacttttttaaaaaaacacgatttccaactgcca

SEQ ID NO: 61933 - DNA, 50 bp, synthetic construct
  source 1..50: mol_type = other DNA
ctccatgttctgtcctttcccggtggccgtggagggggcagatcatggca

SEQ ID NO: 61934 - DNA, 50 bp, synthetic construct
  source 1..50: mol_type = other DNA
attaaaaaccgcccttatttatgatagtatgtctaagtgcggtttatgat

SEQ ID NO: 61935 - DNA, 50 bp, synthetic construct
  source 1..50: mol_type = other DNA
ttccgcgcaacatgttttcatctcaacagataaaaaagtgttgcgcggat

SEQ ID NO: 61936 - DNA, 50 bp, synthetic construct
  source 1..50: mol_type = other DNA
cgtcttcctgcggatttgacagaccggcgagaccggtccgcgatgagacg

SEQ ID NO: 61937 - DNA, 50 bp, synthetic construct
  source 1..50: mol_type = other DNA
tctcaatcgtaatgatattgattttaagatagtttttatacagattgaga

SEQ ID NO: 61938 - DNA, 50 bp, synthetic construct
  source 1..50: mol_type = other DNA
ctcctttaaaggggcaactgtcagtactcggccttgtccttggccagggt

SEQ ID NO: 61939 - DNA, 50 bp, synthetic construct
  source 1..50: mol_type = other DNA
attcactgaaatgctctgacagagaggtccttgccctcattgccctggga

SEQ ID NO: 61940 - DNA, 50 bp, synthetic construct
  source 1..50: mol_type = other DNA
caggagggccaggaggtagaggatgcagcggaggaaaggtgatcctacat

SEQ ID NO: 61941 - DNA, 50 bp, synthetic construct
  source 1..50: mol_type = other DNA
ttttcccccggggatttcccgtgcctcctcggtggtctccccggggaagc

SEQ ID NO: 61942 - DNA, 50 bp, synthetic construct
  source 1..50: mol_type = other DNA
tgccattggggattacctcactaaatttaatgcggtatctgacataataa

SEQ ID NO: 61943 - DNA, 50 bp, synthetic construct
  source 1..50: mol_type = other DNA
ctgcgatttcttcctctgacaaaagctgatgtgtgataaagaagtaatag

SEQ ID NO: 61944 - DNA, 50 bp, synthetic construct
  source 1..50: mol_type = other DNA
tcaggttgttagagtcgatggtgcggggtaccacgatagccttacccaaa

SEQ ID NO: 61945 - DNA, 50 bp, synthetic construct
  source 1..50: mol_type = other DNA
aaagcacagtccctggtcggtgtgataagaccaacctttctatagatata

SEQ ID NO: 61946 - DNA, 50 bp, synthetic construct
  source 1..50: mol_type = other DNA
aaacttataatagtggagtattaataataattctactatatactaatgat

SEQ ID NO: 61947 - DNA, 50 bp, synthetic construct
  source 1..50: mol_type = other DNA
caaggctatcctaatactgataatatacacaaggcggtacatccgctttt

SEQ ID NO: 61948 - DNA, 50 bp, synthetic construct
  source 1..50: mol_type = other DNA
ttataataatctattgtcccaaagcattttatcctaatagattataatta

SEQ ID NO: 61949 - DNA, 50 bp, synthetic construct
  source 1..50: mol_type = other DNA
ccgccgaggcgtgggcggcgaagctcgcctcgccgcacatctacgggggg

SEQ ID NO: 61950 - DNA, 50 bp, synthetic construct
  source 1..50: mol_type = other DNA
ataccgcatcatgggatgggaagcaggctcgacactacttgacgcggggt

SEQ ID NO: 61951 - DNA, 50 bp, synthetic construct
  source 1..50: mol_type = other DNA
accattgttatttttgcaacgccgatcggcttttgcgaaataaaaataat

SEQ ID NO: 61952 - DNA, 50 bp, synthetic construct
  source 1..50: mol_type = other DNA
ggtaatacactggatacattctcaaagacttaagtataccgtcgattatg

SEQ ID NO: 61953 - DNA, 50 bp, synthetic construct
  source 1..50: mol_type = other DNA
tgtttgcaacaggtatgcatctcatttgttatgcatatcttttgcaaaca

SEQ ID NO: 61954 - DNA, 50 bp, synthetic construct
  source 1..50: mol_type = other DNA
tttctcggcctgttctcgcgcatggtctggcgcgccggcgcgtcgaacgc

SEQ ID NO: 61955 - DNA, 50 bp, synthetic construct
  source 1..50: mol_type = other DNA
tgcgttgcgcccagtgcggtggcggccgcgaggagactacatgcaacgag

SEQ ID NO: 61956 - DNA, 50 bp, synthetic construct
  source 1..50: mol_type = other DNA
ggcgcctccttctccgctacacaggcacgacaggcggccggcgaggcgat

SEQ ID NO: 61957 - DNA, 50 bp, synthetic construct
  source 1..50: mol_type = other DNA
atggaaccttttacagagcatatccaggcgtgctatgttattagttccac

SEQ ID NO: 61958 - DNA, 50 bp, synthetic construct
  source 1..50: mol_type = other DNA
cattttctactaaatcaacctgtcatcattggatggatttgtagaaatgt

SEQ ID NO: 61959 - DNA, 50 bp, synthetic construct
  source 1..50: mol_type = other DNA
gttttgataaatcgcttgttaagggccgttaactagcgttttaccaaaac

SEQ ID NO: 61960 - DNA, 50 bp, synthetic construct
  source 1..50: mol_type = other DNA
atgtatgttactagcagcttcatatctgtgaagtctcttttcagggtaaa

SEQ ID NO: 61961 - DNA, 50 bp, synthetic construct
  source 1..50: mol_type = other DNA
accaatatgaggctgaacgggatgcggtagctcgtcaggctcataacctg

SEQ ID NO: 61962 - DNA, 50 bp, synthetic construct
  source 1..50: mol_type = other DNA
actagtcaattgttgtacaacttcaagaagtgctgccacaattacctaca

SEQ ID NO: 61963 - DNA, 50 bp, synthetic construct
  source 1..50: mol_type = other DNA
ggaagtactttttatcaaaaattttaaaattatttatattttccacttga

SEQ ID NO: 61964 - DNA, 50 bp, synthetic construct
  source 1..50: mol_type = other DNA
aatgtattcagcgagttgctcttcatgattttcacttcctaaaacaccct

SEQ ID NO: 61965 - DNA, 50 bp, synthetic construct
  source 1..50: mol_type = other DNA
cagaaggcatgaaaaagcccctaaccctagatacttcacaatgcgttctg

SEQ ID NO: 61966 - DNA, 50 bp, synthetic construct
  source 1..50: mol_type = other DNA
gttcatcaaactgatactacagttaaaggaggaatttcagtatgaaaaaa

SEQ ID NO: 61967 - DNA, 50 bp, synthetic construct
  source 1..50: mol_type = other DNA
aaaacttggtggtgatggtatcgaaatcgacgccaccaacatcaaatgta

SEQ ID NO: 61968 - DNA, 50 bp, synthetic construct
  source 1..50: mol_type = other DNA
ttataaataatgtacttaagttagtcataaatgatgcggtttttttagcc

SEQ ID NO: 61969 - DNA, 50 bp, synthetic construct
  source 1..50: mol_type = other DNA
agtttggacaacaaaccaacaacttcgacatgttcttgtttgtccaaaac

SEQ ID NO: 61970 - DNA, 50 bp, synthetic construct
  source 1..50: mol_type = other DNA
gtcatcattatcacagtttcaacgtgccttgtggcggtgataatgatgcc

SEQ ID NO: 61971 - DNA, 50 bp, synthetic construct
  source 1..50: mol_type = other DNA
agcgttttgatgaagtttttttaattttaccataaaacttacaaaatagg

SEQ ID NO: 61972 - DNA, 50 bp, synthetic construct
  source 1..50: mol_type = other DNA
tatttttgagcaagaaaaaagcattacttctttttttaccgaaaaaaaga

SEQ ID NO: 61973 - DNA, 50 bp, synthetic construct
  source 1..50: mol_type = other DNA
tccagtgatttataaatatcattcaccacaaataatgatattttttaaga

SEQ ID NO: 61974 - DNA, 50 bp, synthetic construct
  source 1..50: mol_type = other DNA
ttgtcccgataggctatgccgcacaggtgctgcaaaggtactcaagtcgg

SEQ ID NO: 61975 - DNA, 50 bp, synthetic construct
  source 1..50: mol_type = other DNA
gtttaagggctcatttttgaaatagatattataaaattgaaccttatttt

SEQ ID NO: 61976 - DNA, 50 bp, synthetic construct
  source 1..50: mol_type = other DNA
actggataaatttaatcatttcgataccgacacgtttttgtttgagttgt

SEQ ID NO: 61977 - DNA, 50 bp, synthetic construct
  source 1..50: mol_type = other DNA
tcattctgttcgcgtccatagcttccaacctacaaggcaatcggcgatga

SEQ ID NO: 61978 - DNA, 50 bp, synthetic construct
  source 1..50: mol_type = other DNA
atgatcaccaacgggcagccttggcgccaagcgttgacggtgctcatcgt

SEQ ID NO: 61979 - DNA, 50 bp, synthetic construct
  source 1..50: mol_type = other DNA
caggagtccagctattttttctagttatttaaagaatggaaatgttgacc

SEQ ID NO: 61980 - DNA, 50 bp, synthetic construct
  source 1..50: mol_type = other DNA
gattaattccaacatcaattaaactactttgatgcgttaaaggattaatc

SEQ ID NO: 61981 - DNA, 50 bp, synthetic construct
  source 1..50: mol_type = other DNA
tcaaacaactcactgatttcatgaaaacatgaggtcgcgatgtcctttgc

SEQ ID NO: 61982 - DNA, 50 bp, synthetic construct
  source 1..50: mol_type = other DNA
aaattatatgaactatatatgatgtatttcatatatagcgcataaacatt

SEQ ID NO: 61983 - DNA, 50 bp, synthetic construct
  source 1..50: mol_type = other DNA
aattgatcgttgaaaactatgtcggaggagttagaagaaaatgaatttga

SEQ ID NO: 61984 - DNA, 50 bp, synthetic construct
  source 1..50: mol_type = other DNA
caccaacgccacaaagaacacggccggctcccgcctgcgtggcggcggtt

SEQ ID NO: 61985 - DNA, 50 bp, synthetic construct
  source 1..50: mol_type = other DNA
atggcgaatcccggcctgcagccggaccttgacaattaaagattggccaa

SEQ ID NO: 61986 - DNA, 50 bp, synthetic construct
  source 1..50: mol_type = other DNA
gattgcgtctattcgattgttcatatatgaagctgtgatgagccgcatac

SEQ ID NO: 61987 - DNA, 50 bp, synthetic construct
  source 1..50: mol_type = other DNA
tgtggcagttccattataccacattccggtatccagccggaactgtacag

SEQ ID NO: 61988 - DNA, 50 bp, synthetic construct
  source 1..50: mol_type = other DNA
agcaagcaggccgcacaggagagatatacgttatagccctcctgctcaat

SEQ ID NO: 61989 - DNA, 50 bp, synthetic construct
  source 1..50: mol_type = other DNA
taataactttgaaagtttttagcaaaaactaaaaaaacgatgttgaacaa

SEQ ID NO: 61990 - DNA, 50 bp, synthetic construct
  source 1..50: mol_type = other DNA
tgaaatcaataagagagaaatgcttttggcgtttatttatgcacatttca

SEQ ID NO: 61991 - DNA, 50 bp, synthetic construct
  source 1..50: mol_type = other DNA
tggagtttgttaaaggttttatttaatacgaatacctataataatatatt

SEQ ID NO: 61992 - DNA, 50 bp, synthetic construct
  source 1..50: mol_type = other DNA
taaaataaacttaatatttcttctaattgacaaatattaaatttacgatt

SEQ ID NO: 61993 - DNA, 50 bp, synthetic construct
  source 1..50: mol_type = other DNA
ccgggcgtgcttctcttgggctagcgccgcccgctcagaagcagaagcgg

SEQ ID NO: 61994 - DNA, 50 bp, synthetic construct
  source 1..50: mol_type = other DNA
ttttatcattcatttttaattctcctaaagaaaaaacaactatgataatt

SEQ ID NO: 61995 - DNA, 50 bp, synthetic construct
  source 1..50: mol_type = other DNA
ttagtattcgttttattgttttctaaaatgaatgataaaacgaatttaaa

SEQ ID NO: 61996 - DNA, 50 bp, synthetic construct
  source 1..50: mol_type = other DNA
aaatagaacttaccaagagtttctttcacatctatttcaagcatccattt

SEQ ID NO: 61997 - DNA, 50 bp, synthetic construct
  source 1..50: mol_type = other DNA
tagaaagttaagatgctaaagaagtacttggaaaatctcgtgtctactac

SEQ ID NO: 61998 - DNA, 50 bp, synthetic construct
  source 1..50: mol_type = other DNA
ttgaggcatatgtataatctcccaattgatagattatacagatcaatgta

SEQ ID NO: 61999 - DNA, 50 bp, synthetic construct
  source 1..50: mol_type = other DNA
agtcaaaataatcaccttttacttttatgtaaaaggtgcggtaaagcatg

SEQ ID NO: 62000 - DNA, 50 bp, synthetic construct
  source 1..50: mol_type = other DNA
taaaaaatacctattcgacataatcatttacttctttatcctatttcctt

SEQ ID NO: 62001 - DNA, 50 bp, synthetic construct
  source 1..50: mol_type = other DNA
gaattctttatttccaaatactcttaacaggattttcaaatgaagaagaa

SEQ ID NO: 62002 - DNA, 50 bp, synthetic construct
  source 1..50: mol_type = other DNA
gttgttttatcttgaaccagtaattcattaatatttcaaaataaagtatt

SEQ ID NO: 62003 - DNA, 50 bp, synthetic construct
  source 1..50: mol_type = other DNA
caagaaaaaaccgcatcatttatgatgatacgcctctgcgtctcggttag

SEQ ID NO: 62004 - DNA, 50 bp, synthetic construct
  source 1..50: mol_type = other DNA
tttttcatttgcattgtctataattaatctaaggagggctatctatgaaa

SEQ ID NO: 62005 - DNA, 50 bp, synthetic construct
  source 1..50: mol_type = other DNA
ccctcgaactggtgcagctggccgattttgatattaccgttcttcatcag

SEQ ID NO: 62006 - DNA, 50 bp, synthetic construct
  source 1..50: mol_type = other DNA
cgggaaacgggtataaatctttggtcttgatttcctgccttactgtcccg

SEQ ID NO: 62007 - DNA, 50 bp, synthetic construct
  source 1..50: mol_type = other DNA
aaaaacttgatgagattgcattattaataatgtaattattagaacaattt

SEQ ID NO: 62008 - DNA, 50 bp, synthetic construct
  source 1..50: mol_type = other DNA
gacaaactaattcgacctgataaattttttgctctcaatctgattttttc

SEQ ID NO: 62009 - DNA, 50 bp, synthetic construct
  source 1..50: mol_type = other DNA
tgaggtttcgatctctgatgaagcgagctggatgcgttaccgaggatgcc

SEQ ID NO: 62010 - DNA, 50 bp, synthetic construct
  source 1..50: mol_type = other DNA
aattgtattctcaaggaccagacaacgcgacacgtggagtgcgtagtgtt

SEQ ID NO: 62011 - DNA, 50 bp, synthetic construct
  source 1..50: mol_type = other DNA
atccaaaacggatggcggccaacggacttaaaaaagcatcctttgatgag

SEQ ID NO: 62012 - DNA, 50 bp, synthetic construct
  source 1..50: mol_type = other DNA
atgtattctcaaggaccagacaacacgtggagtgcgtagtgttgctacaa

SEQ ID NO: 62013 - DNA, 50 bp, synthetic construct
  source 1..50: mol_type = other DNA
tcagaaattagcaaaatcaaaaagaagtcaattatcgacctaataactgg

SEQ ID NO: 62014 - DNA, 50 bp, synthetic construct
  source 1..50: mol_type = other DNA
taaaaacggagcggtcacaattatatagaaattagagaggggcgatatta

SEQ ID NO: 62015 - DNA, 50 bp, synthetic construct
  source 1..50: mol_type = other DNA
acattatttgttttcataactgaaattcattttatccactttaatgttag

SEQ ID NO: 62016 - DNA, 50 bp, synthetic construct
  source 1..50: mol_type = other DNA
ttttgggttaataatacatttactagaggaaatggaccattaacccaaaa

SEQ ID NO: 62017 - DNA, 50 bp, synthetic construct
  source 1..50: mol_type = other DNA
ttataaaaagttagtgctaaaagggcaattacaagaaaaacttttcaaaa

SEQ ID NO: 62018 - DNA, 50 bp, synthetic construct
  source 1..50: mol_type = other DNA
atgtaaaagctttaaccttagcttttctaacaaggtaaaagccttgacct

SEQ ID NO: 62019 - DNA, 50 bp, synthetic construct
  source 1..50: mol_type = other DNA
gttttcatggttaggcctccttattaattatagacaatgcaaatgaaaaa

SEQ ID NO: 62020 - DNA, 50 bp, synthetic construct
  source 1..50: mol_type = other DNA
ataattaattagcattgaagttaaaaaaaagtaaaagtgtgatagcatat

SEQ ID NO: 62021 - DNA, 50 bp, synthetic construct
  source 1..50: mol_type = other DNA
gaagaaaatggtaaacaagtcaaaattttgaaagctttactagtggagaa

SEQ ID NO: 62022 - DNA, 50 bp, synthetic construct
  source 1..50: mol_type = other DNA
cattcgttcctttaatttttgggttaatgtaaaaaaatgaacaattggca

SEQ ID NO: 62023 - DNA, 50 bp, synthetic construct
  source 1..50: mol_type = other DNA
gcggttttcataggtagacctccttgttagtacctagtcataaaaatgga

SEQ ID NO: 62024 - DNA, 50 bp, synthetic construct
  source 1..50: mol_type = other DNA
tattatatgaaaaacaaacattgtgatacggttattttttttatatatgc

SEQ ID NO: 62025 - DNA, 50 bp, synthetic construct
  source 1..50: mol_type = other DNA
tgaaggaatgaaagatatcctctttttcgaatatatattataaaggtgaa

SEQ ID NO: 62026 - DNA, 50 bp, synthetic construct
  source 1..50: mol_type = other DNA
attattttatactatatttcttttataaaaataagcaagtattaattaat

SEQ ID NO: 62027 - DNA, 50 bp, synthetic construct
  source 1..50: mol_type = other DNA
ttctcctttcgtacgtacgttctattgctatactggaagtgaagtgaggt

SEQ ID NO: 62028 - DNA, 50 bp, synthetic construct
  source 1..50: mol_type = other DNA
ggggtgtaaaccaccataatcgactatcccaacgtatgcttttacacccg

SEQ ID NO: 62029 - DNA, 50 bp, synthetic construct
  source 1..50: mol_type = other DNA
aaatcatttaaaaaatggttcgaaaacagaaatttctgcttttgtcccgt

SEQ ID NO: 62030 - DNA, 50 bp, synthetic construct
  source 1..50: mol_type = other DNA
tagtatctttaactttgggaaactccggtttccccaacttaaagagataa

SEQ ID NO: 62031 - DNA, 50 bp, synthetic construct
  source 1..50: mol_type = other DNA
tgggtatatggtgaagtgttgtactggtttagctagcggggatgtaccct

SEQ ID NO: 62032 - DNA, 50 bp, synthetic construct
  source 1..50: mol_type = other DNA
agggtacatccccgctaactaaaccagtataatcgttcatcatctaccct

SEQ ID NO: 62033 - DNA, 50 bp, synthetic construct
  source 1..50: mol_type = other DNA
gtttttgccctatttttttccacgttatgggaaaaaagaagttttaaaaa

SEQ ID NO: 62034 - DNA, 50 bp, synthetic construct
  source 1..50: mol_type = other DNA
ttcatccattttataatagaaattcaggcagtgattccttaaaccctgat

SEQ ID NO: 62035 - DNA, 50 bp, synthetic construct
  source 1..50: mol_type = other DNA
tgttgtggtttgagggcaaaaattgggctttctgtcctctgcctgccgca

SEQ ID NO: 62036 - DNA, 50 bp, synthetic construct
  source 1..50: mol_type = other DNA
cagacatttagcggtgttcttttcatggcggaaacatggcagaagtggag

SEQ ID NO: 62037 - DNA, 50 bp, synthetic construct
  source 1..50: mol_type = other DNA
ctctcgtgcatcacgaactcgacgccggtcgagttggtcgcccagcgatc

SEQ ID NO: 62038 - DNA, 50 bp, synthetic construct
  source 1..50: mol_type = other DNA
ctctgccccttgaacttgatcgacgagccgaacatgctcaagggtgatac

SEQ ID NO: 62039 - DNA, 50 bp, synthetic construct
  source 1..50: mol_type = other DNA
cactcccaggtccggtgcccgcccgtctgcgtcaacccgtactgggtgtg

SEQ ID NO: 62040 - DNA, 50 bp, synthetic construct
  source 1..50: mol_type = other DNA
tggtataatgaaatcatgaatgctgatgcagaaaatctttcaataaaaca

SEQ ID NO: 62041 - DNA, 50 bp, synthetic construct
  source 1..50: mol_type = other DNA
cagtactttcaatttttgtttttaaataaagacattttgttaaagtacag

SEQ ID NO: 62042 - DNA, 50 bp, synthetic construct
  source 1..50: mol_type = other DNA
cagaagttaatttgtgagtaactgtatagcatctcacaaatgaggtgctt

SEQ ID NO: 62043 - DNA, 50 bp, synthetic construct
  source 1..50: mol_type = other DNA
gggatccagcgggacgttcttggcatggtcagggtgtcgatccggatgtc

SEQ ID NO: 62044 - DNA, 50 bp, synthetic construct
  source 1..50: mol_type = other DNA
aagcgcgggctactactcactcatcgacatgacccctctacacatcgcta

SEQ ID NO: 62045 - DNA, 50 bp, synthetic construct
  source 1..50: mol_type = other DNA
attagtagcaccttggaatgaagaattctggtgctttatttttacctgat

SEQ ID NO: 62046 - DNA, 50 bp, synthetic construct
  source 1..50: mol_type = other DNA
atttcagttttaagaaaataagtgaaataaaattttcttaattatgatat

SEQ ID NO: 62047 - DNA, 50 bp, synthetic construct
  source 1..50: mol_type = other DNA
taagatacatgcagtaatttccgtttcaatttatatgggtatgaatctgt

SEQ ID NO: 62048 - DNA, 50 bp, synthetic construct
  source 1..50: mol_type = other DNA
attttaatacaaataaatttactctatgattatggtggttgctaaaaaac

SEQ ID NO: 62049 - DNA, 50 bp, synthetic construct
  source 1..50: mol_type = other DNA
ggcatgtctctcactttctcccgccgggcggaggtggactgggacatgct

SEQ ID NO: 62050 - DNA, 50 bp, synthetic construct
  source 1..50: mol_type = other DNA
ttttaactgacagcggtaaaaagctgccgttttgaatgatatatccaaaa

SEQ ID NO: 62051 - DNA, 50 bp, synthetic construct
  source 1..50: mol_type = other DNA
aacgaaggggaaggaaatatggcatactcattttttcctactcctttctt

SEQ ID NO: 62052 - DNA, 50 bp, synthetic construct
  source 1..50: mol_type = other DNA
gttatttttctttttatttactgaattatatcaaaaataaggtcaagata

SEQ ID NO: 62053 - DNA, 50 bp, synthetic construct
  source 1..50: mol_type = other DNA
cagaagaaatagtaaaaatattatttttctaatcttttcagattcttctt

SEQ ID NO: 62054 - DNA, 50 bp, synthetic construct
  source 1..50: mol_type = other DNA
agagttggtttagcattttgcacgaacgtgtaaacatctaaacccaccct

SEQ ID NO: 62055 - DNA, 50 bp, synthetic construct
  source 1..50: mol_type = other DNA
acgcacgaagtcctcggcggtctggccagcaacgccccgaacgccccgtt

SEQ ID NO: 62056 - DNA, 50 bp, synthetic construct
  source 1..50: mol_type = other DNA
tgtgtgcataattatctttggtttcagaaacagactgcgtattgagtaca

SEQ ID NO: 62057 - DNA, 50 bp, synthetic construct
  source 1..50: mol_type = other DNA
atctattttttaaaaaagtttcaaaaatgaatcttagacaaaaaatagtt

SEQ ID NO: 62058 - DNA, 50 bp, synthetic construct
  source 1..50: mol_type = other DNA
tattataaaaatgatgtgataaatgtatttgtctaatcattgttataata

SEQ ID NO: 62059 - DNA, 50 bp, synthetic construct
  source 1..50: mol_type = other DNA
tgacaaatcaaggcatgcaaaaaatatttttagaacgatttcattatatc

SEQ ID NO: 62060 - DNA, 50 bp, synthetic construct
  source 1..50: mol_type = other DNA
gcgcagtctatttttaattttttcatagaaaacagaaaaatccaataata

SEQ ID NO: 62061 - DNA, 50 bp, synthetic construct
  source 1..50: mol_type = other DNA
aagtttttagaaggaacagaagtaaatactattgctccttttggaacttt

SEQ ID NO: 62062 - DNA, 50 bp, synthetic construct
  source 1..50: mol_type = other DNA
gctttattattttcgctatgtacatattcaagtgttttttataagcaaga

SEQ ID NO: 62063 - DNA, 50 bp, synthetic construct
  source 1..50: mol_type = other DNA
ctaaaagaagtctaggatacataaatttatctcaccaccttttctttcag

SEQ ID NO: 62064 - DNA, 50 bp, synthetic construct
  source 1..50: mol_type = other DNA
gctctagtagcttgtttatttagattataaataaaaagtaacctattttt

SEQ ID NO: 62065 - DNA, 50 bp, synthetic construct
  source 1..50: mol_type = other DNA
agcgagagttcgacacttccccctcagaggggaagtagtcgaacttggcg

SEQ ID NO: 62066 - DNA, 50 bp, synthetic construct
  source 1..50: mol_type = other DNA
tatctgctcgttgtagcaacacaatactatgggaagacaaagattgaacc

SEQ ID NO: 62067 - DNA, 50 bp, synthetic construct
  source 1..50: mol_type = other DNA
tttggtatctcgtttcttcttcttccaacgagagataacgagatactaaa

SEQ ID NO: 62068 - DNA, 50 bp, synthetic construct
  source 1..50: mol_type = other DNA
ccgatgaacttaagtcgaagcaagttctctgcatgatttaggtgcatcat

SEQ ID NO: 62069 - DNA, 50 bp, synthetic construct
  source 1..50: mol_type = other DNA
ctaacattttacacctcatttattataaaaatggagtaacaaaacaaatg

SEQ ID NO: 62070 - DNA, 50 bp, synthetic construct
  source 1..50: mol_type = other DNA
cacaaggaacatttggggtggatgacccgtctggggtcccttcgtgagcc

SEQ ID NO: 62071 - DNA, 50 bp, synthetic construct
  source 1..50: mol_type = other DNA
ctggaatatcgtgtgagcgtcaccgtttaatacttcaccgactatgcccc

SEQ ID NO: 62072 - DNA, 50 bp, synthetic construct
  source 1..50: mol_type = other DNA
gccgcaaagccccgtggttacgggctattcaaactccagacagacagtac

SEQ ID NO: 62073 - DNA, 50 bp, synthetic construct
  source 1..50: mol_type = other DNA
taaacatcgttaacatcagaaacttggctttctccggtcccatagctttt

SEQ ID NO: 62074 - DNA, 50 bp, synthetic construct
  source 1..50: mol_type = other DNA
tccccttcgggcggagcaggggctccagcctttggaggatgggattgtga

SEQ ID NO: 62075 - DNA, 50 bp, synthetic construct
  source 1..50: mol_type = other DNA
ttatgtgaaatgcgctatcagataattctcttgctacttttttcacatgg

SEQ ID NO: 62076 - DNA, 50 bp, synthetic construct
  source 1..50: mol_type = other DNA
tcgaagataaccagttcaacctgttcattctttggcgtggcgaagtagga

SEQ ID NO: 62077 - DNA, 50 bp, synthetic construct
  source 1..50: mol_type = other DNA
aatatttttgcggtcaacctaagcatatttccattgactataattatttt

SEQ ID NO: 62078 - DNA, 50 bp, synthetic construct
  source 1..50: mol_type = other DNA
tcgcagagatgctttgatcaggtcacgatttggaaccagctgctctttat

SEQ ID NO: 62079 - DNA, 50 bp, synthetic construct
  source 1..50: mol_type = other DNA
tgtaggtagttgtagcagcatttcttgatgtgttgcaacaattcactacc

SEQ ID NO: 62080 - DNA, 50 bp, synthetic construct
  source 1..50: mol_type = other DNA
tacttctacaaattgcgggatgtttcgttatcccgtaatctgtagaaata

SEQ ID NO: 62081 - DNA, 50 bp, synthetic construct
  source 1..50: mol_type = other DNA
tgatcacaccgccgaccctgtagccatagacgggaagtgtacgggaagtc

SEQ ID NO: 62082 - DNA, 50 bp, synthetic construct
  source 1..50: mol_type = other DNA
atccttctgcatcaacaacataccattgttgtatcacttttgatataaat

SEQ ID NO: 62083 - DNA, 50 bp, synthetic construct
  source 1..50: mol_type = other DNA
gtaccgggtgctgatgtttccgggacgccctgtacatcagcttcctccag

SEQ ID NO: 62084 - DNA, 50 bp, synthetic construct
  source 1..50: mol_type = other DNA
atagggtacagaaaaagccacatggcacggtgtttttctcgattttgtat

SEQ ID NO: 62085 - DNA, 50 bp, synthetic construct
  source 1..50: mol_type = other DNA
agaaaaacggcgtgaccttcgggtcaacgtctcctgcacggtgtttttct

SEQ ID NO: 62086 - DNA, 50 bp, synthetic construct
  source 1..50: mol_type = other DNA
tattaaaagcataacgtatttataatatttagcggtttattctattaata

SEQ ID NO: 62087 - DNA, 50 bp, synthetic construct
  source 1..50: mol_type = other DNA
tgatgtgacttataaatcatttatttgtaaaatttgtataaaacttatca

SEQ ID NO: 62088 - DNA, 50 bp, synthetic construct
  source 1..50: mol_type = other DNA
ggtacgtgttggcgaaccgtgaccgtcgtcaagcttcgccaactcgtact

SEQ ID NO: 62089 - DNA, 50 bp, synthetic construct
  source 1..50: mol_type = other DNA
catgcgcccgcgccaaggcccgcacgtgctgctgttccagcgcgcgccgc

SEQ ID NO: 62090 - DNA, 50 bp, synthetic construct
  source 1..50: mol_type = other DNA
aaaagaattttagtgaccttgattgaaatgaaggatagtaaaattcttta

SEQ ID NO: 62091 - DNA, 50 bp, synthetic construct
  source 1..50: mol_type = other DNA
aaaatgtttttgtgggaaggtcaattttatttaaatgcgggaaaccgctt

SEQ ID NO: 62092 - DNA, 50 bp, synthetic construct
  source 1..50: mol_type = other DNA
gtgccgtagaatccaagcagatgcgaaactcgcctgcgattcgagccaat

SEQ ID NO: 62093 - DNA, 50 bp, synthetic construct
  source 1..50: mol_type = other DNA
aaaaatggctaagattggatttttatgaaagggttatctgccacaggttt

SEQ ID NO: 62094 - DNA, 50 bp, synthetic construct
  source 1..50: mol_type = other DNA
cttccgcacgacgccaataggctgtgcagcctatgtcagtcgcgccgatc

SEQ ID NO: 62095 - DNA, 50 bp, synthetic construct
  source 1..50: mol_type = other DNA
gtggcccgcccgcgcgaagagtggatccacccttcgcccgaccgcgccgc

SEQ ID NO: 62096 - DNA, 50 bp, synthetic construct
  source 1..50: mol_type = other DNA
tacatatcaagcatctaaccaatcttgatttagtttaaccttgatattat

SEQ ID NO: 62097 - DNA, 50 bp, synthetic construct
  source 1..50: mol_type = other DNA
cagttccaaaacggaacgtatgacatgtaaaaggtgattattttgactaa

SEQ ID NO: 62098 - DNA, 50 bp, synthetic construct
  source 1..50: mol_type = other DNA
aaggccggatttacttttcaggggtctgtttgaaaaaagaaggcggcctg

SEQ ID NO: 62099 - DNA, 50 bp, synthetic construct
  source 1..50: mol_type = other DNA
tgaatgtaactgtatttgtgacaaataaatcacaattacagcgatggtga

SEQ ID NO: 62100 - DNA, 50 bp, synthetic construct
  source 1..50: mol_type = other DNA
tattgtgggtatatgatattagggaacccgaaagtagtcaacccccaata

SEQ ID NO: 62101 - DNA, 50 bp, synthetic construct
  source 1..50: mol_type = other DNA
aaggttcgatctcggaaaataatccggggagccatttcagatcgaaactg

SEQ ID NO: 62102 - DNA, 50 bp, synthetic construct
  source 1..50: mol_type = other DNA
ggctaggtgattaaagattaaagaattctcgaatctgccactgaccagaa

SEQ ID NO: 62103 - DNA, 50 bp, synthetic construct
  source 1..50: mol_type = other DNA
ttgtctcttactttatttcttgattgatataaaaccaatcttagacattt

SEQ ID NO: 62104 - DNA, 50 bp, synthetic construct
  source 1..50: mol_type = other DNA
tcccccaattccgagcaatgtatagtaacagtttgctcggtgctgaatat

SEQ ID NO: 62105 - DNA, 50 bp, synthetic construct
  source 1..50: mol_type = other DNA
cttaatcagcttcacagggtctgttaacagaagctgaaaaaaccaacgtc

SEQ ID NO: 62106 - DNA, 50 bp, synthetic construct
  source 1..50: mol_type = other DNA
accgtgcccataaaaaaaccccgccggcggggatacgctcataagcgcta

SEQ ID NO: 62107 - DNA, 50 bp, synthetic construct
  source 1..50: mol_type = other DNA
cgaagctgatagtatatcgactcgatagagtattgcacttatcatctcca

SEQ ID NO: 62108 - DNA, 50 bp, synthetic construct
  source 1..50: mol_type = other DNA
agagcattattgtcaaaaatgccattttacattggtggaaatgtaagtta

SEQ ID NO: 62109 - DNA, 50 bp, synthetic construct
  source 1..50: mol_type = other DNA
tattttctctgtccttataaggttaagatttgtcaaggacataaacaaaa

SEQ ID NO: 62110 - DNA, 50 bp, synthetic construct
  source 1..50: mol_type = other DNA
atcaattacatttgccaattttataagacaccccaccaaatttaagtgaa

SEQ ID NO: 62111 - DNA, 50 bp, synthetic construct
  source 1..50: mol_type = other DNA
taaaaacttcaaacagtagaaaaaaatttactaatggttgcaggtattgt

SEQ ID NO: 62112 - DNA, 50 bp, synthetic construct
  source 1..50: mol_type = other DNA
atgacttgaatataagtttggacaattgtccaaacttgatgtcgataaac

SEQ ID NO: 62113 - DNA, 50 bp, synthetic construct
  source 1..50: mol_type = other DNA
ttgtgaaagctttaaggttgcagttttctttctgattaaagatttctttt

SEQ ID NO: 62114 - DNA, 50 bp, synthetic construct
  source 1..50: mol_type = other DNA
agtttggacaataatgtcaccgtctcaacttgctcatcattgtccaaacc

SEQ ID NO: 62115 - DNA, 50 bp, synthetic construct
  source 1..50: mol_type = other DNA
agtttggacaaaagtgctaccgtctcaacatattcatcattgtccaaact

SEQ ID NO: 62116 - DNA, 50 bp, synthetic construct
  source 1..50: mol_type = other DNA
cccaagaacaagctttagaaggacatggtattcaaaaggaaattttttca

SEQ ID NO: 62117 - DNA, 50 bp, synthetic construct
  source 1..50: mol_type = other DNA
ttaacgatttagtccaggttatatcacaattatatggactttatctaact

SEQ ID NO: 62118 - DNA, 50 bp, synthetic construct
  source 1..50: mol_type = other DNA
ttttcggaaagaattcgagaaattacttttcatgcaaaaatttaaaagag

SEQ ID NO: 62119 - DNA, 50 bp, synthetic construct
  source 1..50: mol_type = other DNA
cacgatttcactctttgtatcaacgcagacctacagcctcgacgtgtgct

SEQ ID NO: 62120 - DNA, 50 bp, synthetic construct
  source 1..50: mol_type = other DNA
ttctgacggcattttttttcacaaatttggaacaaatagaaatatcaaaa

SEQ ID NO: 62121 - DNA, 50 bp, synthetic construct
  source 1..50: mol_type = other DNA
gtaaagtgaacccatatcaagttaaataactggataattttttcttttag

SEQ ID NO: 62122 - DNA, 50 bp, synthetic construct
  source 1..50: mol_type = other DNA
gttgatgatgtagtcaaaaattcaattatgattttggtcaacgtatcatc

SEQ ID NO: 62123 - DNA, 50 bp, synthetic construct
  source 1..50: mol_type = other DNA
agaaatctagttcaaaaaagcgaagattattttttttgaaaaaaatttta

SEQ ID NO: 62124 - DNA, 50 bp, synthetic construct
  source 1..50: mol_type = other DNA
ttaaaagatgctgaagtggtttcatattaaagaactggtatttgactcac

SEQ ID NO: 62125 - DNA, 50 bp, synthetic construct
  source 1..50: mol_type = other DNA
ctacttcttcaacaatagcaacagtcttgtccgtccaaatgaagaagtac

SEQ ID NO: 62126 - DNA, 50 bp, synthetic construct
  source 1..50: mol_type = other DNA
atcaggcaacctcctcatagtcgtgatccactaagaatacgttccctgac

SEQ ID NO: 62127 - DNA, 50 bp, synthetic construct
  source 1..50: mol_type = other DNA
ttcattattcattacctccacatgtatttgcttattgtatgaataatccg

SEQ ID NO: 62128 - DNA, 50 bp, synthetic construct
  source 1..50: mol_type = other DNA
taataggaatcataagagagattattaaatcgaacataagttcgtgaaag

SEQ ID NO: 62129 - DNA, 50 bp, synthetic construct
  source 1..50: mol_type = other DNA
tttgatacccagtgccttagtcagcgctctctaagccctccaaatacaaa

SEQ ID NO: 62130 - DNA, 50 bp, synthetic construct
  source 1..50: mol_type = other DNA
ccgtccgcgtcgaagtagggcactgaagtgcgtcactgcatggcgtcgtg

SEQ ID NO: 62131 - DNA, 50 bp, synthetic construct
  source 1..50: mol_type = other DNA
attactggacatgtttcaagagtgtacacctatgagaagagcgagaggat

SEQ ID NO: 62132 - DNA, 50 bp, synthetic construct
  source 1..50: mol_type = other DNA
tttgaggcgttgcgccgccagctctacaggatggccccgaacgccgccgc

SEQ ID NO: 62133 - DNA, 50 bp, synthetic construct
  source 1..50: mol_type = other DNA
ttgctgaccgccgttttcagtttttcaaaatcctatacggcgatccgctc

SEQ ID NO: 62134 - DNA, 50 bp, synthetic construct
  source 1..50: mol_type = other DNA
ggggcggcgaaaccgtcccctgccctgccactggacctcctgcccgccgc

SEQ ID NO: 62135 - DNA, 50 bp, synthetic construct
  source 1..50: mol_type = other DNA
tgagtggaaaatctgatttcctaccccgttccagccgttccttccgctct

SEQ ID NO: 62136 - DNA, 50 bp, synthetic construct
  source 1..50: mol_type = other DNA
acctttcatttgtccacctccataatttgaaccgtgggatttccccgcgc

SEQ ID NO: 62137 - DNA, 50 bp, synthetic construct
  source 1..50: mol_type = other DNA
ttcccggcctcgtgcattgatacgattattctatcacacgcggcggggaa

SEQ ID NO: 62138 - DNA, 50 bp, synthetic construct
  source 1..50: mol_type = other DNA
cgggggcaccgtcggccagctcctcgaggtcgcagcaatgatcaacctcg

SEQ ID NO: 62139 - DNA, 50 bp, synthetic construct
  source 1..50: mol_type = other DNA
acgtgcccctcagcgtcggcggcgctcgccgccgacggcgcggatcatat

SEQ ID NO: 62140 - DNA, 50 bp, synthetic construct
  source 1..50: mol_type = other DNA
ataacgtcaacccagatatttttctagaaaaacatatgggtagcgcatct

SEQ ID NO: 62141 - DNA, 50 bp, synthetic construct
  source 1..50: mol_type = other DNA
tttaatagcttccgcttctgttgaattgttttaaagttcgattacctatt

SEQ ID NO: 62142 - DNA, 50 bp, synthetic construct
  source 1..50: mol_type = other DNA
ttaaatcaactattgtttccttctcatcattatctaactaacaaatgccc

SEQ ID NO: 62143 - DNA, 50 bp, synthetic construct
  source 1..50: mol_type = other DNA
ttctgccatgctgttgcctcctttcaattggaggctttatcgctgacaaa

SEQ ID NO: 62144 - DNA, 50 bp, synthetic construct
  source 1..50: mol_type = other DNA
attgtttaaatgcgccgataactttaaagtaattgttccatttgaaaaaa

SEQ ID NO: 62145 - DNA, 50 bp, synthetic construct
  source 1..50: mol_type = other DNA
ggagaatgtccgagctcttttgcttaaatctaatgctcctttcattttgg

SEQ ID NO: 62146 - DNA, 50 bp, synthetic construct
  source 1..50: mol_type = other DNA
tcataatcatttctcctgctatgtagtcaatatagagcaaatgtcgaacc

SEQ ID NO: 62147 - DNA, 50 bp, synthetic construct
  source 1..50: mol_type = other DNA
gatcggcctcgccgcgtaacggcccgagccgagggtgggcggcctgaccc

SEQ ID NO: 62148 - DNA, 50 bp, synthetic construct
  source 1..50: mol_type = other DNA
ggaagtgttcaagtaaggcttaagcagagtgctgttacttgaacactcag

SEQ ID NO: 62149 - DNA, 50 bp, synthetic construct
  source 1..50: mol_type = other DNA
gttcaggccggtggccagggcccagcggggtccttctcgtttctctacac

SEQ ID NO: 62150 - DNA, 50 bp, synthetic construct
  source 1..50: mol_type = other DNA
ctccggctccgaccgacttggagcgggctctcagtgggagttgtggccgt

SEQ ID NO: 62151 - DNA, 50 bp, synthetic construct
  source 1..50: mol_type = other DNA
agctcttgggtgtaaaaagcaacgttggttgaggattacacccctcgcgt

SEQ ID NO: 62152 - DNA, 50 bp, synthetic construct
  source 1..50: mol_type = other DNA
ccggcgaggcggtgcgcatctacggcttacagcccggatcgcgtcgccga

SEQ ID NO: 62153 - DNA, 50 bp, synthetic construct
  source 1..50: mol_type = other DNA
taaaaaaatccttccttcaaaaataagaatttgaagtagaacttcaaggg

SEQ ID NO: 62154 - DNA, 50 bp, synthetic construct
  source 1..50: mol_type = other DNA
ccgacctcagtgaggcacgcaaggcaccagaagggccgcacagggcagct

SEQ ID NO: 62155 - DNA, 50 bp, synthetic construct
  source 1..50: mol_type = other DNA
tcatcgatgaccagcctgctgctgatctccagcgacctgtacatgcttcc

SEQ ID NO: 62156 - DNA, 50 bp, synthetic construct
  source 1..50: mol_type = other DNA
ttctaaaaagtgtagaacaagagtttaattttgttccacactttgttttc

SEQ ID NO: 62157 - DNA, 50 bp, synthetic construct
  source 1..50: mol_type = other DNA
gatcaaaatgatcatttctccttgaagaaaataagtcgaaccatttaata

SEQ ID NO: 62158 - DNA, 50 bp, synthetic construct
  source 1..50: mol_type = other DNA
tacatatacaccacattctatacaattgttttaaatgtgggggcatttta

SEQ ID NO: 62159 - DNA, 50 bp, synthetic construct
  source 1..50: mol_type = other DNA
aaagtagtgcaaacaccaaaaaacactgttagcgcaatttacactacttt

SEQ ID NO: 62160 - DNA, 50 bp, synthetic construct
  source 1..50: mol_type = other DNA
aatatggtgaacaaattaaccaaggatatggcgtttttgttcatgataac

SEQ ID NO: 62161 - DNA, 50 bp, synthetic construct
  source 1..50: mol_type = other DNA
tacattattattatatggggtaataactaaccctataaaaatatagagag

SEQ ID NO: 62162 - DNA, 50 bp, synthetic construct
  source 1..50: mol_type = other DNA
tactgttgaaaacttagatcaaacgtgtgagatagaagacgcggcggagc

SEQ ID NO: 62163 - DNA, 50 bp, synthetic construct
  source 1..50: mol_type = other DNA
tttccgtgtccgtcttggtatgaaggacagcgccaagaacatcacggaca

SEQ ID NO: 62164 - DNA, 50 bp, synthetic construct
  source 1..50: mol_type = other DNA
cgctcatgcaaaagagacggttggcgagattctcctgtttcagatcagct

SEQ ID NO: 62165 - DNA, 50 bp, synthetic construct
  source 1..50: mol_type = other DNA
tttgactttcgttagctgttacttcgatacatactccaacgaatttctaa

SEQ ID NO: 62166 - DNA, 50 bp, synthetic construct
  source 1..50: mol_type = other DNA
aggacaacgcttagaaatcttgatacgtcaccaatgctaacagtaacgct

SEQ ID NO: 62167 - DNA, 50 bp, synthetic construct
  source 1..50: mol_type = other DNA
gttgttcagtcatgatcactccttttcataagagatcatgccttcatgtt

SEQ ID NO: 62168 - DNA, 50 bp, synthetic construct
  source 1..50: mol_type = other DNA
gggcgggaagcggacagatgcaggcgcgtgccgccgcccgcgaggcgctg

SEQ ID NO: 62169 - DNA, 50 bp, synthetic construct
  source 1..50: mol_type = other DNA
cagggcctgtcggccagcatcgaccggacggtcgacctggcgaacccctc

SEQ ID NO: 62170 - DNA, 50 bp, synthetic construct
  source 1..50: mol_type = other DNA
ttgtagcaacactacgcactccacgtgttgtctggtccttgagaatacaa

SEQ ID NO: 62171 - DNA, 50 bp, synthetic construct
  source 1..50: mol_type = other DNA
aagtaaagaattgcctggtatagaaaatttacgcgtaaaagcctttactt

SEQ ID NO: 62172 - DNA, 50 bp, synthetic construct
  source 1..50: mol_type = other DNA
aacagctatcaagttatgagaatcaggtagtacaaaatttgatattattt

SEQ ID NO: 62173 - DNA, 50 bp, synthetic construct
  source 1..50: mol_type = other DNA
acttattatcaagctttgaactctaaaaagatcagagtagccgcttattg

SEQ ID NO: 62174 - DNA, 50 bp, synthetic construct
  source 1..50: mol_type = other DNA
aaaatgattagaaagtccttgacaagtaatagaattaaggagaacactta

SEQ ID NO: 62175 - DNA, 50 bp, synthetic construct
  source 1..50: mol_type = other DNA
attattttctctgtccctaaaaggttcactttgggaagatttgtcaagga

SEQ ID NO: 62176 - DNA, 50 bp, synthetic construct
  source 1..50: mol_type = other DNA
caatccgtttcatttgaaggtaaacaagccacttcaaaacaaacggtcac

SEQ ID NO: 62177 - DNA, 50 bp, synthetic construct
  source 1..50: mol_type = other DNA
gttcaaaaggatccactggcatcttaattgttcaagtgataataaggaac

SEQ ID NO: 62178 - DNA, 50 bp, synthetic construct
  source 1..50: mol_type = other DNA
aaatagggattccgcaatctaattattatttaagagtaacaattgcacaa

SEQ ID NO: 62179 - DNA, 50 bp, synthetic construct
  source 1..50: mol_type = other DNA
ttacaatatatattaaatttctttataaagtaatataattgggattttta

SEQ ID NO: 62180 - DNA, 50 bp, synthetic construct
  source 1..50: mol_type = other DNA
agcatcaatttcagatgtattgcacatgcggtacatctgaaattatgtct

SEQ ID NO: 62181 - DNA, 50 bp, synthetic construct
  source 1..50: mol_type = other DNA
ttttaatatatttcttcttactctatataataacagaagcagtactagta

SEQ ID NO: 62182 - DNA, 50 bp, synthetic construct
  source 1..50: mol_type = other DNA
tttcgttgtagcaacacacaagtctccacatgtgtggtagctgctatcag

SEQ ID NO: 62183 - DNA, 50 bp, synthetic construct
  source 1..50: mol_type = other DNA
aaggtttcaccaagttacattacatttgaaaggtaatctgatgaaaccac

SEQ ID NO: 62184 - DNA, 50 bp, synthetic construct
  source 1..50: mol_type = other DNA
tcaaaatcttcacccacttatttactataattgtcaatctctcttttgga

SEQ ID NO: 62185 - DNA, 50 bp, synthetic construct
  source 1..50: mol_type = other DNA
tgttatcaccatgttggcgtaaatctaattacaccaacaaggtgacgaca

SEQ ID NO: 62186 - DNA, 50 bp, synthetic construct
  source 1..50: mol_type = other DNA
tatacacgctgtgctcttttgttgtacatcaaatgaatacagttaggttg

SEQ ID NO: 62187 - DNA, 50 bp, synthetic construct
  source 1..50: mol_type = other DNA
aatacctgaatatatagtaaagtgttttttttgaattatattcatttatt

SEQ ID NO: 62188 - DNA, 50 bp, synthetic construct
  source 1..50: mol_type = other DNA
aaataaagattggcggtcggtggttacacacctagcgacaaataaagagg

SEQ ID NO: 62189 - DNA, 50 bp, synthetic construct
  source 1..50: mol_type = other DNA
tttagtttctcgtttcttcttcttccaacgagagataatgagatactaaa

SEQ ID NO: 62190 - DNA, 50 bp, synthetic construct
  source 1..50: mol_type = other DNA
cgagtaagcatgagatggcggagagagcggagatcttgcaggcttactcc

SEQ ID NO: 62191 - DNA, 50 bp, synthetic construct
  source 1..50: mol_type = other DNA
ttttgtactaatacactagaaccatcaggtaatgatgtgttagtacaaaa

SEQ ID NO: 62192 - DNA, 50 bp, synthetic construct
  source 1..50: mol_type = other DNA
atatataatggcaaatttatttaaatccaacttatttttccaatataata

SEQ ID NO: 62193 - DNA, 50 bp, synthetic construct
  source 1..50: mol_type = other DNA
taaagtatgggagtttttgaaaaatattagtggaacggttttttgctttt

SEQ ID NO: 62194 - DNA, 50 bp, synthetic construct
  source 1..50: mol_type = other DNA
attttgtgcttcttctaaaagcaactaatatagataaagaagcatgggat

SEQ ID NO: 62195 - DNA, 50 bp, synthetic construct
  source 1..50: mol_type = other DNA
atacttttcatgtatctataaatgtttctttatatattaaataaaatgaa

SEQ ID NO: 62196 - DNA, 50 bp, synthetic construct
  source 1..50: mol_type = other DNA
acagggtttatttggccttatttccttaatttatagccaattaaacccaa

SEQ ID NO: 62197 - DNA, 50 bp, synthetic construct
  source 1..50: mol_type = other DNA
gtgtcagtgtttcatcgacgggaggagcgttaatcagagcgctatgacac

SEQ ID NO: 62198 - DNA, 50 bp, synthetic construct
  source 1..50: mol_type = other DNA
acccgtacggccatcccgcgccgagcggggctcggcgtccgcgtacgagt

SEQ ID NO: 62199 - DNA, 50 bp, synthetic construct
  source 1..50: mol_type = other DNA
acgttcaaggaccgtaacagactccagtgactggtttctgacaattgcac

SEQ ID NO: 62200 - DNA, 50 bp, synthetic construct
  source 1..50: mol_type = other DNA
gaatcagcttatcagagttgtacgattacacatttgaaatttaagggaat

SEQ ID NO: 62201 - DNA, 50 bp, synthetic construct
  source 1..50: mol_type = other DNA
atgcttaaaaccgtttataacattctaatgttatatatggttttatcctt

SEQ ID NO: 62202 - DNA, 50 bp, synthetic construct
  source 1..50: mol_type = other DNA
aaactttctcatccattccggttacagagaagcggtggatgaggctgtta

SEQ ID NO: 62203 - DNA, 50 bp, synthetic construct
  source 1..50: mol_type = other DNA
gaagggcatcagatctccgaccgcggggggctcgatgtttgacggtcttc

SEQ ID NO: 62204 - DNA, 50 bp, synthetic construct
  source 1..50: mol_type = other DNA
aatagatagctattttcatttgaatcatcaatacaaaatagtagtttact

SEQ ID NO: 62205 - DNA, 50 bp, synthetic construct
  source 1..50: mol_type = other DNA
aagaatatatgtcagaacaattaaatttaccaaataccctctaatttcta

SEQ ID NO: 62206 - DNA, 50 bp, synthetic construct
  source 1..50: mol_type = other DNA
cggattctatttggaatgtatatataatttctttatatttatcaaataaa

SEQ ID NO: 62207 - DNA, 50 bp, synthetic construct
  source 1..50: mol_type = other DNA
cgtggtggtggacgaggaggagggcctgcccgtcgtcggcaggctcggag

SEQ ID NO: 62208 - DNA, 50 bp, synthetic construct
  source 1..50: mol_type = other DNA
atttaacggacgataaatttgacctaatcaaaaggtatcctcctttcgtt

SEQ ID NO: 62209 - DNA, 50 bp, synthetic construct
  source 1..50: mol_type = other DNA
atttaacggacgataaatttgacctaatcaaaagtcatcctcctttcgtt

SEQ ID NO: 62210 - DNA, 50 bp, synthetic construct
  source 1..50: mol_type = other DNA
ctgacgtcaatcggggaatgacggtcttttgattagacgattgaatacgg

SEQ ID NO: 62211 - DNA, 50 bp, synthetic construct
  source 1..50: mol_type = other DNA
taagaagtaggcaaggaaaagcctgaagagacaaccaatccgatctttta

SEQ ID NO: 62212 - DNA, 50 bp, synthetic construct
  source 1..50: mol_type = other DNA
cattacttgtgatacgattgtcccttgagcgtatcgtttcaaacagcggt

SEQ ID NO: 62213 - DNA, 50 bp, synthetic construct
  source 1..50: mol_type = other DNA
cctagtaacgctggtgcgttcgtcagcatgaaagcattgacgttactagc

SEQ ID NO: 62214 - DNA, 50 bp, synthetic construct
  source 1..50: mol_type = other DNA
cacggtaaatggatattaccaacaatcgttggtgcttttcactatgattg

SEQ ID NO: 62215 - DNA, 50 bp, synthetic construct
  source 1..50: mol_type = other DNA
gtacacacaatgaggaaaacaattttatttgtcttccatttttttacgga

SEQ ID NO: 62216 - DNA, 50 bp, synthetic construct
  source 1..50: mol_type = other DNA
tttttaataatgtgtatgtaaattataatttacatacatgtttattaatg

SEQ ID NO: 62217 - DNA, 50 bp, synthetic construct
  source 1..50: mol_type = other DNA
ttatattaataagaaattttgatatttttaaatgaagcttatttatgcaa

SEQ ID NO: 62218 - DNA, 50 bp, synthetic construct
  source 1..50: mol_type = other DNA
acgacaagggtaaaatacccttcacatgattggtattgtgaccccatcag

SEQ ID NO: 62219 - DNA, 50 bp, synthetic construct
  source 1..50: mol_type = other DNA
ctcactttcagcgctgactatgaggcctccgcgcagaggatcgcggcgag

SEQ ID NO: 62220 - DNA, 50 bp, synthetic construct
  source 1..50: mol_type = other DNA
ttgcagtttatttcttggttgcgttaattacaccaacaaggtgacgacaa

SEQ ID NO: 62221 - DNA, 50 bp, synthetic construct
  source 1..50: mol_type = other DNA
gaatagttcgacgcttcctactctgggaagcagtcgaacttgacggcttc

SEQ ID NO: 62222 - DNA, 50 bp, synthetic construct
  source 1..50: mol_type = other DNA
tttctggggtgtgcaaggcgtgttcccacatgcgcaaagcagcttcgaaa

SEQ ID NO: 62223 - DNA, 50 bp, synthetic construct
  source 1..50: mol_type = other DNA
caccgaaggtccgccccctccgcaccggcataggcgggggacagcgccgc

SEQ ID NO: 62224 - DNA, 50 bp, synthetic construct
  source 1..50: mol_type = other DNA
agtccgtagagcgggcttatcgagcgcattgagcgcctcgcgctcggagc

SEQ ID NO: 62225 - DNA, 50 bp, synthetic construct
  source 1..50: mol_type = other DNA
ggcgggtggggcggattagtacctcggctgcctctgccctcccgtccggt

SEQ ID NO: 62226 - DNA, 50 bp, synthetic construct
  source 1..50: mol_type = other DNA
cggcatcgtctggcgcacatccgcgctggtgcaccatgggccggataccg

SEQ ID NO: 62227 - DNA, 50 bp, synthetic construct
  source 1..50: mol_type = other DNA
agaatcgattacatgaactcgatttatgccacacagaagtttgtgattca

SEQ ID NO: 62228 - DNA, 50 bp, synthetic construct
  source 1..50: mol_type = other DNA
ttgccatcactgcacctcgctttctataaaagttttatcagatatggtaa

SEQ ID NO: 62229 - DNA, 50 bp, synthetic construct
  source 1..50: mol_type = other DNA
gtcagtgtccatacatcactctgtttgcagaaattgcggaggacactgtg

SEQ ID NO: 62230 - DNA, 50 bp, synthetic construct
  source 1..50: mol_type = other DNA
tcgtcgcggaccggcggtttcggctaatggcaaaaaacggtgcgcgagta

SEQ ID NO: 62231 - DNA, 50 bp, synthetic construct
  source 1..50: mol_type = other DNA
aacataaaatgcaagttatcactatacagtgcataactacaaagacggct

SEQ ID NO: 62232 - DNA, 50 bp, synthetic construct
  source 1..50: mol_type = other DNA
atgatcttcgggttcatgcagagcgaggcgtagatgaacacgaagatcac

SEQ ID NO: 62233 - DNA, 50 bp, synthetic construct
  source 1..50: mol_type = other DNA
ttaactaaataacaccctattattgggttcgatgggtgtttcataattaa

SEQ ID NO: 62234 - DNA, 50 bp, synthetic construct
  source 1..50: mol_type = other DNA
tctaacttctattaatattgttataaattgaaattataggtaaggttaag

SEQ ID NO: 62235 - DNA, 50 bp, synthetic construct
  source 1..50: mol_type = other DNA
agggctgataggcaggcagggctggcggtaactgcctgagcggcaacgac

SEQ ID NO: 62236 - DNA, 50 bp, synthetic construct
  source 1..50: mol_type = other DNA
gcgccccgatcgcgtatctcgaccagcggtttgaacgaagcccgccggga

SEQ ID NO: 62237 - DNA, 50 bp, synthetic construct
  source 1..50: mol_type = other DNA
atataataaataaaaagcaaatgtaaacaattggttagtattatctagtt

SEQ ID NO: 62238 - DNA, 50 bp, synthetic construct
  source 1..50: mol_type = other DNA
cgggaaaatacccaccaaccgcttattaaaagtaggctcttattttatat

SEQ ID NO: 62239 - DNA, 50 bp, synthetic construct
  source 1..50: mol_type = other DNA
ttgcaacggcaccgcgtataggtatgccgccgtacgagctgccgcggcac

SEQ ID NO: 62240 - DNA, 50 bp, synthetic construct
  source 1..50: mol_type = other DNA
atactgtgtttttatacagtattagccaatgcgcaattgacgccgcacat

SEQ ID NO: 62241 - DNA, 50 bp, synthetic construct
  source 1..50: mol_type = other DNA
gcagggaaacggaaaaaatcatcagcgccacaatttatccgcgcccatcg

SEQ ID NO: 62242 - DNA, 50 bp, synthetic construct
  source 1..50: mol_type = other DNA
ttgttgttttccttgggcaacaggcgacaagaagtcagcgtaaacatcag

SEQ ID NO: 62243 - DNA, 50 bp, synthetic construct
  source 1..50: mol_type = other DNA
atttttctacgaatgtgactggtcatcacaagcgggtttggtagaaaatg

SEQ ID NO: 62244 - DNA, 50 bp, synthetic construct
  source 1..50: mol_type = other DNA
caaaaaattcaagaaacaaattatattggatttatgacttgatataagtg

SEQ ID NO: 62245 - DNA, 50 bp, synthetic construct
  source 1..50: mol_type = other DNA
acccacctcaaccttttggtaggtaacactactgacatgctgagccatta

SEQ ID NO: 62246 - DNA, 50 bp, synthetic construct
  source 1..50: mol_type = other DNA
caagttatcactatacattagacagagagcaaatgtacagtgcataacta

SEQ ID NO: 62247 - DNA, 50 bp, synthetic construct
  source 1..50: mol_type = other DNA
aacgttattcctgttaatcatacatacgcaagattaacaggaataaaaat

SEQ ID NO: 62248 - DNA, 50 bp, synthetic construct
  source 1..50: mol_type = other DNA
tccgcacttcttcctatattgaaattttatcattttttaggaaattttga

SEQ ID NO: 62249 - DNA, 50 bp, synthetic construct
  source 1..50: mol_type = other DNA
gtgttgatggaaatatcactattaataggatgtgattcaacttgcaacga

SEQ ID NO: 62250 - DNA, 50 bp, synthetic construct
  source 1..50: mol_type = other DNA
gtgttacatccaccgatgccttgcgaacagagcatcggcggaagtaacct

SEQ ID NO: 62251 - DNA, 50 bp, synthetic construct
  source 1..50: mol_type = other DNA
gatagttttttgtcgcactgttgaagacagcagttgaacaaaaataaggt

SEQ ID NO: 62252 - DNA, 50 bp, synthetic construct
  source 1..50: mol_type = other DNA
atttataagaccctagttagaaagtacattgcaacgtgtttctcataaat

SEQ ID NO: 62253 - DNA, 50 bp, synthetic construct
  source 1..50: mol_type = other DNA
gcagacggaagggaaactgcgttttgatccggcccatctcgttggtcaga

SEQ ID NO: 62254 - DNA, 50 bp, synthetic construct
  source 1..50: mol_type = other DNA
tgcccttccggcccgggctgccgatctcggccgtcaagaccgcaatgcct

SEQ ID NO: 62255 - DNA, 50 bp, synthetic construct
  source 1..50: mol_type = other DNA
gtccccacgccaaacccgatatctgtaattacggggttttttgaggggat

SEQ ID NO: 62256 - DNA, 50 bp, synthetic construct
  source 1..50: mol_type = other DNA
tcttatagaatacaacatcgtgcatagccaccattttgtagtagctaccc

SEQ ID NO: 62257 - DNA, 50 bp, synthetic construct
  source 1..50: mol_type = other DNA
ctaatactcactggcgagcatcaccgctgaaagacgccatgaacgatgcg

SEQ ID NO: 62258 - DNA, 50 bp, synthetic construct
  source 1..50: mol_type = other DNA
caaaattagggtttgggaattaggaagacaattccgaaccattaaataat

SEQ ID NO: 62259 - DNA, 50 bp, synthetic construct
  source 1..50: mol_type = other DNA
cggatattgttggattagaaactaagagtaggggacaaagacaagtagcg

SEQ ID NO: 62260 - DNA, 50 bp, synthetic construct
  source 1..50: mol_type = other DNA
atggaaatgatataatttcattgttggctgaggcggcagatcatttccag

SEQ ID NO: 62261 - DNA, 50 bp, synthetic construct
  source 1..50: mol_type = other DNA
tttttcagctgcttgatgagctcgccggagaatgagggggcactgtcatg

SEQ ID NO: 62262 - DNA, 50 bp, synthetic construct
  source 1..50: mol_type = other DNA
cacagaagaaatatggaatggtgttgcctgcacaccttttttcttatgcg

SEQ ID NO: 62263 - DNA, 50 bp, synthetic construct
  source 1..50: mol_type = other DNA
gtgaaacaacaaaatctcagctagagtgagcaggtattgcgcctgctcac

SEQ ID NO: 62264 - DNA, 50 bp, synthetic construct
  source 1..50: mol_type = other DNA
gtcaaaatagaatatacttttattataataaaggttagactaatttttag

SEQ ID NO: 62265 - DNA, 50 bp, synthetic construct
  source 1..50: mol_type = other DNA
cctgaactacagcgccaagcgcctgcatctgcttcatcaatttcttcatg

SEQ ID NO: 62266 - DNA, 50 bp, synthetic construct
  source 1..50: mol_type = other DNA
atcgcgctcggctggcagcgcctgcgcttgctccgcacgctgagcgctca

SEQ ID NO: 62267 - DNA, 50 bp, synthetic construct
  source 1..50: mol_type = other DNA
ctgcgatgctccgcacatcggcatcgcgacggaagacccagacgtcgcag

SEQ ID NO: 62268 - DNA, 50 bp, synthetic construct
  source 1..50: mol_type = other DNA
tagcgtccatctggttggggtcgacgaaggccggaagtgtttggccgatt

SEQ ID NO: 62269 - DNA, 50 bp, synthetic construct
  source 1..50: mol_type = other DNA
tttttcataaaaatggattaattaaaaaattgttcatgtttttaggtttt

SEQ ID NO: 62270 - DNA, 50 bp, synthetic construct
  source 1..50: mol_type = other DNA
tcgctgaattattggaacgttttaactacaaatataaaattatttttact

SEQ ID NO: 62271 - DNA, 50 bp, synthetic construct
  source 1..50: mol_type = other DNA
tcacagcctttcggggtaaagtatcctaacaaaaaatactaaatctctac

SEQ ID NO: 62272 - DNA, 50 bp, synthetic construct
  source 1..50: mol_type = other DNA
tgttggtgtaattagatttactccattgtttcgatacagatccaccagca

SEQ ID NO: 62273 - DNA, 50 bp, synthetic construct
  source 1..50: mol_type = other DNA
tgtcgtcatcctcttggcgtcaacctaattacaccaacaaggtgacgaca

SEQ ID NO: 62274 - DNA, 50 bp, synthetic construct
  source 1..50: mol_type = other DNA
tacattttctttatagttttaaagttggttaaatgaataatataaaattg

SEQ ID NO: 62275 - DNA, 50 bp, synthetic construct
  source 1..50: mol_type = other DNA
tacaatacaaacggaattaaaaatcccactttatgagggcttttatttta

SEQ ID NO: 62276 - DNA, 50 bp, synthetic construct
  source 1..50: mol_type = other DNA
ctatcttaaaggataaccctgaactaaaggaccggcattttgtaaagcta

SEQ ID NO: 62277 - DNA, 50 bp, synthetic construct
  source 1..50: mol_type = other DNA
ataaataaagaaaaaacgatgctgttcactggtcaggagaagatcctttt

SEQ ID NO: 62278 - DNA, 50 bp, synthetic construct
  source 1..50: mol_type = other DNA
tgataatataatcatatcgtttttataaaactacaatcaatgtataacac

SEQ ID NO: 62279 - DNA, 50 bp, synthetic construct
  source 1..50: mol_type = other DNA
caatactattttattgaaaaagtttaaacttttagtaatctgtatcattt

SEQ ID NO: 62280 - DNA, 50 bp, synthetic construct
  source 1..50: mol_type = other DNA
atttcttggactttctttatatgatttcataggtcgattaaaatagaaaa

SEQ ID NO: 62281 - DNA, 50 bp, synthetic construct
  source 1..50: mol_type = other DNA
cccctcttttacatgaataattattatatattacatgacaaaatgaggtg

SEQ ID NO: 62282 - DNA, 50 bp, synthetic construct
  source 1..50: mol_type = other DNA
agatggcgacatataagcgttcatgcgaatgaatttttcatttttcttct

SEQ ID NO: 62283 - DNA, 50 bp, synthetic construct
  source 1..50: mol_type = other DNA
caaagtatcaacgtttgaattgtttacattatccagaggtgcatacatgt

SEQ ID NO: 62284 - DNA, 50 bp, synthetic construct
  source 1..50: mol_type = other DNA
aacagttgtaattaaaaagcaccttaaggtgcttaacataaacggtattt

SEQ ID NO: 62285 - DNA, 50 bp, synthetic construct
  source 1..50: mol_type = other DNA
cctaaagcatcattcgtcgaaactgcagtttttacccatcgacctttctc

SEQ ID NO: 62286 - DNA, 50 bp, synthetic construct
  source 1..50: mol_type = other DNA
agttggttattagttactgtaagatttatcacggtacccaataaccaacg

SEQ ID NO: 62287 - DNA, 50 bp, synthetic construct
  source 1..50: mol_type = other DNA
agaagaaaaataaaaaattcattagcgtaaacgcttatatgtcgccatct

SEQ ID NO: 62288 - DNA, 50 bp, synthetic construct
  source 1..50: mol_type = other DNA
cagttttcatagttagacctccttattatagacaatgcaaatgaaaaatt

SEQ ID NO: 62289 - DNA, 50 bp, synthetic construct
  source 1..50: mol_type = other DNA
tcgtccaattggtcgtagcatggcatctaattacaccaacaaggtgacga

SEQ ID NO: 62290 - DNA, 50 bp, synthetic construct
  source 1..50: mol_type = other DNA
aattagatttactccattaagccctagaatctaatggaacgagactatat

SEQ ID NO: 62291 - DNA, 50 bp, synthetic construct
  source 1..50: mol_type = other DNA
atgtaagtgatttattagctatattatcattcctaatacatatattaaga

SEQ ID NO: 62292 - DNA, 50 bp, synthetic construct
  source 1..50: mol_type = other DNA
ttgtttcactagattacattacatttttgaaaggtaatctagtgaaactt

SEQ ID NO: 62293 - DNA, 50 bp, synthetic construct
  source 1..50: mol_type = other DNA
atttcccgaaaggataggtacggtgaaccgtatcataaataacggtaaac

SEQ ID NO: 62294 - DNA, 50 bp, synthetic construct
  source 1..50: mol_type = other DNA
cacaccacgcaactgcaagatgcacttgcgcattgtgtcggataggtcgg

SEQ ID NO: 62295 - DNA, 50 bp, synthetic construct
  source 1..50: mol_type = other DNA
gactatatttagtaaatatacctttatatgagtactttctaggtgtattt

SEQ ID NO: 62296 - DNA, 50 bp, synthetic construct
  source 1..50: mol_type = other DNA
gatactctgaaaaattatgcaaaactcacagccgtaaggccctgaggtgt

SEQ ID NO: 62297 - DNA, 50 bp, synthetic construct
  source 1..50: mol_type = other DNA
gtctgtccaactttcggagcgtgagctcacgaccatcccttttcccattc

SEQ ID NO: 62298 - DNA, 50 bp, synthetic construct
  source 1..50: mol_type = other DNA
cttcatccaaaatcggctccaaccaaaaagccagcggtttttgcgggaat

SEQ ID NO: 62299 - DNA, 50 bp, synthetic construct
  source 1..50: mol_type = other DNA
attttggcaactagtttaatttaaatttctcgtgaattagttagcaacaa

SEQ ID NO: 62300 - DNA, 50 bp, synthetic construct
  source 1..50: mol_type = other DNA
taaatcgcgcataatcaagtgttttctaactattctctaagatgaaatta

SEQ ID NO: 62301 - DNA, 50 bp, synthetic construct
  source 1..50: mol_type = other DNA
gaaagaaacgtttttggtacccccgacgccgtttcaaattcagatacacc

SEQ ID NO: 62302 - DNA, 50 bp, synthetic construct
  source 1..50: mol_type = other DNA
ataatatatatttataatttcgtttcaatcctatttttctttgtgacatt

SEQ ID NO: 62303 - DNA, 50 bp, synthetic construct
  source 1..50: mol_type = other DNA
ttttttcgtatattaggtatttccaaagtattacctactacttggaaagt

SEQ ID NO: 62304 - DNA, 50 bp, synthetic construct
  source 1..50: mol_type = other DNA
tgtatcaataaatccggcaagaatcaatcatttccgcccttattaggacc

SEQ ID NO: 62305 - DNA, 50 bp, synthetic construct
  source 1..50: mol_type = other DNA
ggtgtcgtttttggtagtatttgtaaaaatatggtatcaaacttatcaca

SEQ ID NO: 62306 - DNA, 50 bp, synthetic construct
  source 1..50: mol_type = other DNA
agtcgaacaaacaggataatgtattattacccaatcttttttatccctct

SEQ ID NO: 62307 - DNA, 50 bp, synthetic construct
  source 1..50: mol_type = other DNA
ctttttgtcgtcatcttgttggtgtacaccaacatgattacaacaaaaat

SEQ ID NO: 62308 - DNA, 50 bp, synthetic construct
  source 1..50: mol_type = other DNA
tggtatctttaactatgggaaactcccgtttcacttaattaaagatattg

SEQ ID NO: 62309 - DNA, 50 bp, synthetic construct
  source 1..50: mol_type = other DNA
tgatgaataagtctcttaaagcatacgaaaagtcaaggactttttcatca

SEQ ID NO: 62310 - DNA, 50 bp, synthetic construct
  source 1..50: mol_type = other DNA
catatttaaaaaccccctcaacttttgatactggtgtatttttatttttc

SEQ ID NO: 62311 - DNA, 50 bp, synthetic construct
  source 1..50: mol_type = other DNA
tcatgacagggtgcaccgaccacgtacgtggttcgcgcaccctgtcatac

SEQ ID NO: 62312 - DNA, 50 bp, synthetic construct
  source 1..50: mol_type = other DNA
tgtaagctcgcgtcatggggtgtaattacaccccttttttggaaagcagc

SEQ ID NO: 62313 - DNA, 50 bp, synthetic construct
  source 1..50: mol_type = other DNA
gcgacaaacaatggattaacatctgatgatgttatctcattaattttcag

SEQ ID NO: 62314 - DNA, 50 bp, synthetic construct
  source 1..50: mol_type = other DNA
aatatttgaaataagttaaaagttcactttttcaaaaaacacaccgtaaa

SEQ ID NO: 62315 - DNA, 50 bp, synthetic construct
  source 1..50: mol_type = other DNA
atcctggaaccttcacaggtgctgcaaaatacgagtcgttcatgaacgat

SEQ ID NO: 62316 - DNA, 50 bp, synthetic construct
  source 1..50: mol_type = other DNA
taccggacgcagaaaacgctcaaaatatagagcgatttgtgtggatggtg

SEQ ID NO: 62317 - DNA, 50 bp, synthetic construct
  source 1..50: mol_type = other DNA
taaggcagatttttcggcccgtccgcagcccggtagctcgtcaggctcat

SEQ ID NO: 62318 - DNA, 50 bp, synthetic construct
  source 1..50: mol_type = other DNA
gtacaaaaaaatgtctaagattggataaaaattaagaacaaaaaagaaac

SEQ ID NO: 62319 - DNA, 50 bp, synthetic construct
  source 1..50: mol_type = other DNA
tcaaaaatagcgtaaagagaagggaatgaactatattactttaaacaacg

SEQ ID NO: 62320 - DNA, 50 bp, synthetic construct
  source 1..50: mol_type = other DNA
actagaagctcccatctatttgggagcgtaaagagaagggaacatccttt

SEQ ID NO: 62321 - DNA, 50 bp, synthetic construct
  source 1..50: mol_type = other DNA
ataggaactttaatacatttatctgaatatatatgtattaaaatataact

SEQ ID NO: 62322 - DNA, 50 bp, synthetic construct
  source 1..50: mol_type = other DNA
caataaaggtaaaaatacacttgaaatcaagaatttttctcgattggcgg

SEQ ID NO: 62323 - DNA, 50 bp, synthetic construct
  source 1..50: mol_type = other DNA
cttttgaagcatgcatataaaatggccgtttttaatggcatacccaaaag

SEQ ID NO: 62324 - DNA, 50 bp, synthetic construct
  source 1..50: mol_type = other DNA
gcaggtcaaatctgaagaaattttataataataagcactatttggaggga

SEQ ID NO: 62325 - DNA, 50 bp, synthetic construct
  source 1..50: mol_type = other DNA
gaaaatcaattttcactgtttctttaaagaaggcaatgaaataccctgga

SEQ ID NO: 62326 - DNA, 50 bp, synthetic construct
  source 1..50: mol_type = other DNA
tgtagtcccttgtaaactgtactttacataacagtatggattcccttaca

SEQ ID NO: 62327 - DNA, 50 bp, synthetic construct
  source 1..50: mol_type = other DNA
attaggcagccggacagcatcgtggtcacccgcatgctggggcacctgtc

SEQ ID NO: 62328 - DNA, 50 bp, synthetic construct
  source 1..50: mol_type = other DNA
aatatacaataggtagtatgaaaaagttttcagaccaccatatggtgatt

SEQ ID NO: 62329 - DNA, 50 bp, synthetic construct
  source 1..50: mol_type = other DNA
gttccagcttgcggggcacgatgcccggatattggcgcgcaagctggcgc

SEQ ID NO: 62330 - DNA, 50 bp, synthetic construct
  source 1..50: mol_type = other DNA
gatgtccatcgtcgtctcccgcggtccatcatccaataacgagagacatc

SEQ ID NO: 62331 - DNA, 50 bp, synthetic construct
  source 1..50: mol_type = other DNA
cgcaatgcaactatttgcgcagtgatgaatgcgctataggttgcaatgtt

SEQ ID NO: 62332 - DNA, 50 bp, synthetic construct
  source 1..50: mol_type = other DNA
cgttgtagcaacactacgcactccacactcagcggttcgctgttaccgca

SEQ ID NO: 62333 - DNA, 50 bp, synthetic construct
  source 1..50: mol_type = other DNA
gtttggacacaatttcacgttctctaattgtggcttcattaagtccaact

SEQ ID NO: 62334 - DNA, 50 bp, synthetic construct
  source 1..50: mol_type = other DNA
acctacatttccaccaatgtaaaagctattaaatcgctgattgatagtgt

SEQ ID NO: 62335 - DNA, 50 bp, synthetic construct
  source 1..50: mol_type = other DNA
ttcagaaatccatctctcataaaaatttttaaaatgaaaaaaatgatgac

SEQ ID NO: 62336 - DNA, 50 bp, synthetic construct
  source 1..50: mol_type = other DNA
tgctatacacatgttttatattatttatattataacgttgaggttgagca

SEQ ID NO: 62337 - DNA, 50 bp, synthetic construct
  source 1..50: mol_type = other DNA
ataaacaaggtccaggtaacagctgatgtcttttcttgtacccattttat

SEQ ID NO: 62338 - DNA, 50 bp, synthetic construct
  source 1..50: mol_type = other DNA
accaaagctttcttcaaaaccaaacatcaggacaggaagaaaatcaaagt

SEQ ID NO: 62339 - DNA, 50 bp, synthetic construct
  source 1..50: mol_type = other DNA
aaaccgagattcatttacaaaaactttgctttataaatctacctcagttc

SEQ ID NO: 62340 - DNA, 50 bp, synthetic construct
  source 1..50: mol_type = other DNA
gaaaaggaaattttatttacaatcactgttataaaaaacaaactggagga

SEQ ID NO: 62341 - DNA, 50 bp, synthetic construct
  source 1..50: mol_type = other DNA
tcttcatgtacagcattgtaaatagaaattcagaatagaaaatagaaagg

SEQ ID NO: 62342 - DNA, 50 bp, synthetic construct
  source 1..50: mol_type = other DNA
gaatcccgtctttaactccttccatattgaagaagtgaaaaagcagattc

SEQ ID NO: 62343 - DNA, 50 bp, synthetic construct
  source 1..50: mol_type = other DNA
tttttcgagacgatataaaatataattggattttatcacacaaaataaat

SEQ ID NO: 62344 - DNA, 50 bp, synthetic construct
  source 1..50: mol_type = other DNA
aattatcaagtcatttaggtcataatttaccccataattggcagattcct

SEQ ID NO: 62345 - DNA, 50 bp, synthetic construct
  source 1..50: mol_type = other DNA
caaacctttgttgtacccaatcaatatagtttgggtacaacaaagaacac

SEQ ID NO: 62346 - DNA, 50 bp, synthetic construct
  source 1..50: mol_type = other DNA
tagtcagcatctcaataaacagataaagctgtttttaaagataatgacta

SEQ ID NO: 62347 - DNA, 50 bp, synthetic construct
  source 1..50: mol_type = other DNA
tagtttataatttggtcaaacatgagtaagtttgacctaagaaaagaatt

SEQ ID NO: 62348 - DNA, 50 bp, synthetic construct
  source 1..50: mol_type = other DNA
gtatgtttcataaaggagagaaagaactttctctccttttttagcagaga

SEQ ID NO: 62349 - DNA, 50 bp, synthetic construct
  source 1..50: mol_type = other DNA
gtaattttattgtaatattaataaaatttaccataggacaagtaattcag

SEQ ID NO: 62350 - DNA, 50 bp, synthetic construct
  source 1..50: mol_type = other DNA
atactctaatttttcaacacttgtcaaaaagttatttaataccatgctat

SEQ ID NO: 62351 - DNA, 50 bp, synthetic construct
  source 1..50: mol_type = other DNA
taaataaaagaaaaaccgctacttaaaagtagctgattatcttttcttta

SEQ ID NO: 62352 - DNA, 50 bp, synthetic construct
  source 1..50: mol_type = other DNA
aaatttctgctgtcatgtgcatggggccttacaattaacagaaaaaaatt

SEQ ID NO: 62353 - DNA, 50 bp, synthetic construct
  source 1..50: mol_type = other DNA
acataggatcctcccttctggttctgctgccatattcactgatactatgt

SEQ ID NO: 62354 - DNA, 50 bp, synthetic construct
  source 1..50: mol_type = other DNA
aaaaaccctagtataaaacgatacgcatatcataagtgatgcggttttta

SEQ ID NO: 62355 - DNA, 50 bp, synthetic construct
  source 1..50: mol_type = other DNA
cgactccgaacgcatcctcacccagctgggcaagcggccgcgcgccagca

SEQ ID NO: 62356 - DNA, 50 bp, synthetic construct
  source 1..50: mol_type = other DNA
tgcaagcgacgggttgcggcatacgctggataaacaaattgtccaaacca

SEQ ID NO: 62357 - DNA, 50 bp, synthetic construct
  source 1..50: mol_type = other DNA
gcgggctgtttttgtttaacttatcttatgcccataccaaaatggctctt

SEQ ID NO: 62358 - DNA, 50 bp, synthetic construct
  source 1..50: mol_type = other DNA
tttttatccaaatacaggtgaattttaaaggttaaagtgttggaaggaaa

SEQ ID NO: 62359 - DNA, 50 bp, synthetic construct
  source 1..50: mol_type = other DNA
atgttagaaaggataccatcgttcaagacgaaggtctacttttctaacat

SEQ ID NO: 62360 - DNA, 50 bp, synthetic construct
  source 1..50: mol_type = other DNA
cctgggtggccgaaagccgctaagacaaccgttgcggttctgggcaccgg

SEQ ID NO: 62361 - DNA, 50 bp, synthetic construct
  source 1..50: mol_type = other DNA
ctttaatcaagataatcacccttacatataatgaattatccttctagcat

SEQ ID NO: 62362 - DNA, 50 bp, synthetic construct
  source 1..50: mol_type = other DNA
cggctactctaatatttatacaaaacttcttatatcaattttagatgctg

SEQ ID NO: 62363 - DNA, 50 bp, synthetic construct
  source 1..50: mol_type = other DNA
tggcggccgacgttcaagccagaacgttttagtttgtcatttcaatgatc

SEQ ID NO: 62364 - DNA, 50 bp, synthetic construct
  source 1..50: mol_type = other DNA
aacagaaattagagtggatgatgcaagaaaaaaccgctctgcatttctgc

SEQ ID NO: 62365 - DNA, 50 bp, synthetic construct
  source 1..50: mol_type = other DNA
ccgacaaagtaaaactgtgttcacccgtgcgtaccctgctactttccttt

SEQ ID NO: 62366 - DNA, 50 bp, synthetic construct
  source 1..50: mol_type = other DNA
cattaatttaccccctcattcaaaattgtttagaatgtaacctttttata

SEQ ID NO: 62367 - DNA, 50 bp, synthetic construct
  source 1..50: mol_type = other DNA
tcttttttagatttgtcccaacaagtttgtagacccagaagttcaaagtt

SEQ ID NO: 62368 - DNA, 50 bp, synthetic construct
  source 1..50: mol_type = other DNA
acagtttagttttcataccatttccacttgagtaatgataggggtactgg

SEQ ID NO: 62369 - DNA, 50 bp, synthetic construct
  source 1..50: mol_type = other DNA
accatacgggaactttcatttacttaagcgaatggctgtaccgccatcat

SEQ ID NO: 62370 - DNA, 50 bp, synthetic construct
  source 1..50: mol_type = other DNA
agattgtatcgctttaggtagtgtatgctaaagatacccctataccatca

SEQ ID NO: 62371 - DNA, 50 bp, synthetic construct
  source 1..50: mol_type = other DNA
catataagtataaaaaatcgcatcatgatgcggtttttatagaaaaaaat

SEQ ID NO: 62372 - DNA, 50 bp, synthetic construct
  source 1..50: mol_type = other DNA
gtaggcgactttgttcgccgttgctccgtctggcgaacaaagtgaccttc

SEQ ID NO: 62373 - DNA, 50 bp, synthetic construct
  source 1..50: mol_type = other DNA
ttatgtcataaccgatacaataccttagttatgttttcttaaagacataa

SEQ ID NO: 62374 - DNA, 50 bp, synthetic construct
  source 1..50: mol_type = other DNA
actcctcctttcacagtgataatataaactaagcctgagacacgatgagt

SEQ ID NO: 62375 - DNA, 50 bp, synthetic construct
  source 1..50: mol_type = other DNA
attaattaaatacggtacaagactttaagtatggaccatattgtattaac

SEQ ID NO: 62376 - DNA, 50 bp, synthetic construct
  source 1..50: mol_type = other DNA
aaatttctttatatgatttatgtgtacacatataaaattctcttttatgt

SEQ ID NO: 62377 - DNA, 50 bp, synthetic construct
  source 1..50: mol_type = other DNA
attcttccataaacggttggctaatgttgccattccagactatccgcaaa

SEQ ID NO: 62378 - DNA, 50 bp, synthetic construct
  source 1..50: mol_type = other DNA
ggatttccgagatagaaccgcaaccgtgtgtctcgtcatctcggaaattc

SEQ ID NO: 62379 - DNA, 50 bp, synthetic construct
  source 1..50: mol_type = other DNA
gtgtactgccagtcaatcactactcaggctgctatcaataacaagtaata

SEQ ID NO: 62380 - DNA, 50 bp, synthetic construct
  source 1..50: mol_type = other DNA
attttttaaaactatccgtgaaacactttttacagacaaaaaactaaagg

SEQ ID NO: 62381 - DNA, 50 bp, synthetic construct
  source 1..50: mol_type = other DNA
ttttaacactagccgtgaaacacactccacatgtgttgaatactttttac

SEQ ID NO: 62382 - DNA, 50 bp, synthetic construct
  source 1..50: mol_type = other DNA
acagtaactctaacgattgctgtactattagtatcgcttactccaaaacg

SEQ ID NO: 62383 - DNA, 50 bp, synthetic construct
  source 1..50: mol_type = other DNA
gtggtgggatataatttttgtttaatataagcaactttataacatacgga

SEQ ID NO: 62384 - DNA, 50 bp, synthetic construct
  source 1..50: mol_type = other DNA
aaacggcgcgcgccgagctcggccgcctacgcggccagcgccagcatgtt

SEQ ID NO: 62385 - DNA, 50 bp, synthetic construct
  source 1..50: mol_type = other DNA
aatcatgttaattatatcttattttccaatattatattggaggtatgact

SEQ ID NO: 62386 - DNA, 50 bp, synthetic construct
  source 1..50: mol_type = other DNA
tctattgtatccttaattgcttgtttattacctataggtactaatagacc

SEQ ID NO: 62387 - DNA, 50 bp, synthetic construct
  source 1..50: mol_type = other DNA
tgccttgatcgccggaattgtcgccaccgactattctgaattcattctag

SEQ ID NO: 62388 - DNA, 50 bp, synthetic construct
  source 1..50: mol_type = other DNA
cataatctatgatcaagcaccttagccaaggtgcttaatatctggagtaa

SEQ ID NO: 62389 - DNA, 50 bp, synthetic construct
  source 1..50: mol_type = other DNA
gttttcgggttattgtggccttaaatgcacactaacatgagtgacaactg

SEQ ID NO: 62390 - DNA, 50 bp, synthetic construct
  source 1..50: mol_type = other DNA
tttagcatttcaaaccacatttcattggagatgtggtttgaaacacacct

SEQ ID NO: 62391 - DNA, 50 bp, synthetic construct
  source 1..50: mol_type = other DNA
atctttatgtaaatcgagggatgggtagtgccattgatttaactaaagga

SEQ ID NO: 62392 - DNA, 50 bp, synthetic construct
  source 1..50: mol_type = other DNA
cgtttttcatgattccccaaaacttgccttttttgggctcaaaaaaagtg

SEQ ID NO: 62393 - DNA, 50 bp, synthetic construct
  source 1..50: mol_type = other DNA
attttcttgcttttttctttcttcagaaatgaagaacaaaccaacaaaaa

SEQ ID NO: 62394 - DNA, 50 bp, synthetic construct
  source 1..50: mol_type = other DNA
tatccccatgcggttgcgccgccacggagcggctggccaggagcgtcatg

SEQ ID NO: 62395 - DNA, 50 bp, synthetic construct
  source 1..50: mol_type = other DNA
ttgcgggagagggatttgaacccccgcaagttcaagagcctctccgcagc

SEQ ID NO: 62396 - DNA, 50 bp, synthetic construct
  source 1..50: mol_type = other DNA
tatccctatgcggttgcgccgccacggagcggctggccaggagcgtcatg

SEQ ID NO: 62397 - DNA, 50 bp, synthetic construct
  source 1..50: mol_type = other DNA
cctcaacgaaggcgacaatgtcggggtcgaactcgtcgccggcgaggagg

SEQ ID NO: 62398 - DNA, 50 bp, synthetic construct
  source 1..50: mol_type = other DNA
gttctggctcgggtaaaccagatggttttctggttggaaaaaaggccctg

SEQ ID NO: 62399 - DNA, 50 bp, synthetic construct
  source 1..50: mol_type = other DNA
agacattaatccgccttaccatctgccgcgacagatcgagagtagtggct

SEQ ID NO: 62400 - DNA, 50 bp, synthetic construct
  source 1..50: mol_type = other DNA
gcagttttacaagcattatgtctttataaaattgttgcttgctaaaatgc

SEQ ID NO: 62401 - DNA, 50 bp, synthetic construct
  source 1..50: mol_type = other DNA
tcttcctgacctgatgaagaacgctgcagtgagaatactaagcaggaagc

SEQ ID NO: 62402 - DNA, 50 bp, synthetic construct
  source 1..50: mol_type = other DNA
atcagaccaactatttcgacctgataaagtataaaaatagtgttaacgat

SEQ ID NO: 62403 - DNA, 50 bp, synthetic construct
  source 1..50: mol_type = other DNA
tattttcggacatttaatttatcaaatgataaatgaagaatataaaaaag

SEQ ID NO: 62404 - DNA, 50 bp, synthetic construct
  source 1..50: mol_type = other DNA
tctatgagctttgcaagaagagcggccattcttcttttgcagcgacacac

SEQ ID NO: 62405 - DNA, 50 bp, synthetic construct
  source 1..50: mol_type = other DNA
tttcgacctttctgttcatggtaaaatcaccatgagcgaagatttcggca

SEQ ID NO: 62406 - DNA, 50 bp, synthetic construct
  source 1..50: mol_type = other DNA
accctgcgtgccaagatcgggcctccgggcccggagcatgcgcgccctgg

SEQ ID NO: 62407 - DNA, 50 bp, synthetic construct
  source 1..50: mol_type = other DNA
gtgcattattagatgtgtctcttcaggattacacccatcttatgatacac

SEQ ID NO: 62408 - DNA, 50 bp, synthetic construct
  source 1..50: mol_type = other DNA
atagaagttttggtatatgcaaactaagcagccctttattaagggaatat

SEQ ID NO: 62409 - DNA, 50 bp, synthetic construct
  source 1..50: mol_type = other DNA
tttttaaaatcacatcctcaaaaatttaactgtatttgtggttgtaaaat

SEQ ID NO: 62410 - DNA, 50 bp, synthetic construct
  source 1..50: mol_type = other DNA
tatatggagaaattctatataaaatattttattgccctgttccatttata

SEQ ID NO: 62411 - DNA, 50 bp, synthetic construct
  source 1..50: mol_type = other DNA
ctcgtatatagataacatttaagttgctttagctgtccttgcagaacggc

SEQ ID NO: 62412 - DNA, 50 bp, synthetic construct
  source 1..50: mol_type = other DNA
tttgggtctttagataataacatgctgatattgtgcgcaaaagaccctta

SEQ ID NO: 62413 - DNA, 50 bp, synthetic construct
  source 1..50: mol_type = other DNA
gtaggacttgccaagctcctgatgagcgcaaggtcctggaggtcctgcgc

SEQ ID NO: 62414 - DNA, 50 bp, synthetic construct
  source 1..50: mol_type = other DNA
gctcgatccactcgcatcgggccaacggctctcgaccagcagcgtcgagc

SEQ ID NO: 62415 - DNA, 50 bp, synthetic construct
  source 1..50: mol_type = other DNA
gtctggggtccaatgatggacaaaaattagtcaagcattagaccccaacg

SEQ ID NO: 62416 - DNA, 50 bp, synthetic construct
  source 1..50: mol_type = other DNA
tcgatctcaaacagcgcgtcgtaccgccttcaggtgagctttgtcgaaat

SEQ ID NO: 62417 - DNA, 50 bp, synthetic construct
  source 1..50: mol_type = other DNA
gggtccaatggttgcctaaaacaacaaggatttaagacaccattagaccc

SEQ ID NO: 62418 - DNA, 50 bp, synthetic construct
  source 1..50: mol_type = other DNA
atggaacctttaacatagcatgtctggctatgctctgtaaaaggttccgc

SEQ ID NO: 62419 - DNA, 50 bp, synthetic construct
  source 1..50: mol_type = other DNA
cgaagcccgcgccgatgccctggatcagaagggatggtttacgggcgttc

SEQ ID NO: 62420 - DNA, 50 bp, synthetic construct
  source 1..50: mol_type = other DNA
gattcgtttgatcacggcgaccacgcggagtcgcgatggcggcgatctct

SEQ ID NO: 62421 - DNA, 50 bp, synthetic construct
  source 1..50: mol_type = other DNA
ctataaaaaagagacaactattaaatcgaatcattttattgaagatttag

SEQ ID NO: 62422 - DNA, 50 bp, synthetic construct
  source 1..50: mol_type = other DNA
aaagctgtaaaaactctgatgacgattgtcattgaaccatttggtgcaag

SEQ ID NO: 62423 - DNA, 50 bp, synthetic construct
  source 1..50: mol_type = other DNA
atcgttataaaaatagtttggatagctcacaagacgggggtttaaatttt

SEQ ID NO: 62424 - DNA, 50 bp, synthetic construct
  source 1..50: mol_type = other DNA
tgagtaactttcttagggtgatacatatgatataataataaagcaatcaa

SEQ ID NO: 62425 - DNA, 50 bp, synthetic construct
  source 1..50: mol_type = other DNA
gttttatatcatgaaaacaagaacattttcttgtttttatgccttcaaag

SEQ ID NO: 62426 - DNA, 50 bp, synthetic construct
  source 1..50: mol_type = other DNA
ctgagaattatcaggataattatgatcataattatgctaaattgtcaatg

SEQ ID NO: 62427 - DNA, 50 bp, synthetic construct
  source 1..50: mol_type = other DNA
atttgcatatgattttcgtaaagcagcctttgaaatagctatatccaaag

SEQ ID NO: 62428 - DNA, 50 bp, synthetic construct
  source 1..50: mol_type = other DNA
tggcaagcaatcccatgacaatgcccatattgttgagggcagcatgctag

SEQ ID NO: 62429 - DNA, 50 bp, synthetic construct
  source 1..50: mol_type = other DNA
tataaattataatttaaacaattttaaaatttataatttttaattttata

SEQ ID NO: 62430 - DNA, 50 bp, synthetic construct
  source 1..50: mol_type = other DNA
gaattttataacccataacgggcgtctcaccactaaggtttataaaagca

SEQ ID NO: 62431 - DNA, 50 bp, synthetic construct
  source 1..50: mol_type = other DNA
tcaccagctttaacaagccctttctcgaaagtgcttaataatgctggtgc

SEQ ID NO: 62432 - DNA, 50 bp, synthetic construct
  source 1..50: mol_type = other DNA
tcaccagctttaacaagccctttctcaaaagtgcttagtaatgctggtac

SEQ ID NO: 62433 - DNA, 50 bp, synthetic construct
  source 1..50: mol_type = other DNA
tacagccagataaattaaaaattcgaaattctttaatctttaatcaccta

SEQ ID NO: 62434 - DNA, 50 bp, synthetic construct
  source 1..50: mol_type = other DNA
aacacgcaccgaaagtaggctttgttaaaagattacaatcaaaaagccac

SEQ ID NO: 62435 - DNA, 50 bp, synthetic construct
  source 1..50: mol_type = other DNA
ggtcttttaggttccaaaagtagtaaaaggaatcttagatataatagacc

SEQ ID NO: 62436 - DNA, 50 bp, synthetic construct
  source 1..50: mol_type = other DNA
gattcacagaaaacttcttcaaagtactttgatactgttttcggggaaag

SEQ ID NO: 62437 - DNA, 50 bp, synthetic construct
  source 1..50: mol_type = other DNA
gaaaactttgtttaatgttttatataccatatattttatacaaacttttt

SEQ ID NO: 62438 - DNA, 50 bp, synthetic construct
  source 1..50: mol_type = other DNA
tcaggatgtgtttaacgcttaatgcttattaagcgtctacctcttccatg

SEQ ID NO: 62439 - DNA, 50 bp, synthetic construct
  source 1..50: mol_type = other DNA
ttggggtcttgtgaaaacaacatgctgatagtattctcaacggacccgat

SEQ ID NO: 62440 - DNA, 50 bp, synthetic construct
  source 1..50: mol_type = other DNA
tttagtacctcgttatctctcgctggaagaagaagaaacgagataccaaa

SEQ ID NO: 62441 - DNA, 50 bp, synthetic construct
  source 1..50: mol_type = other DNA
tttgatgcgtatctctatcaggttatgaactgaataaggaactttacaag

SEQ ID NO: 62442 - DNA, 50 bp, synthetic construct
  source 1..50: mol_type = other DNA
gtcaaatcgttaaccatatatccaattggaggtatggctatgaataggag

SEQ ID NO: 62443 - DNA, 50 bp, synthetic construct
  source 1..50: mol_type = other DNA
tttaagaatggtataaaaatataagtttttatttatagaacaaagataag

SEQ ID NO: 62444 - DNA, 50 bp, synthetic construct
  source 1..50: mol_type = other DNA
aagtagcaaaggagctttgcttatccataagcaaacattaaatgcttata

SEQ ID NO: 62445 - DNA, 50 bp, synthetic construct
  source 1..50: mol_type = other DNA
ggcacgctggccgatagctatctgatcaggaagcgtaccggcatgtggtt

SEQ ID NO: 62446 - DNA, 50 bp, synthetic construct
  source 1..50: mol_type = other DNA
tgaacagctcacccgctgggtggcgcgctcatgtgttttttggcgtgtcc

SEQ ID NO: 62447 - DNA, 50 bp, synthetic construct
  source 1..50: mol_type = other DNA
caaaaatctccctgatgaattcaggatgatcctcatcagggtgatttttc

SEQ ID NO: 62448 - DNA, 50 bp, synthetic construct
  source 1..50: mol_type = other DNA
aaattggcctacagggtttaattggcgctgcggccgatgcgcggcgcgtt

SEQ ID NO: 62449 - DNA, 50 bp, synthetic construct
  source 1..50: mol_type = other DNA
cgccgctggcggagttctcggttttaaagagagatggcgcgccggcgcgc

SEQ ID NO: 62450 - DNA, 50 bp, synthetic construct
  source 1..50: mol_type = other DNA
gtcatgccgaattgttagattaagacctgaatctaacattttttcttatg

SEQ ID NO: 62451 - DNA, 50 bp, synthetic construct
  source 1..50: mol_type = other DNA
ggtaggtaattgtaacaacacttcttccagctgagcgccaagaaactaat

SEQ ID NO: 62452 - DNA, 50 bp, synthetic construct
  source 1..50: mol_type = other DNA
ggtgtctctcacatttcgtggttgtaccactacgaacgcctgcccaagac

SEQ ID NO: 62453 - DNA, 50 bp, synthetic construct
  source 1..50: mol_type = other DNA
ggttttacatttttgtataatcttgaagttttgtcggaaaatctaaaacg

SEQ ID NO: 62454 - DNA, 50 bp, synthetic construct
  source 1..50: mol_type = other DNA
aaatcactcaataacactataccttaatgtatagtgataacttgcatttt

SEQ ID NO: 62455 - DNA, 50 bp, synthetic construct
  source 1..50: mol_type = other DNA
gaaaacaattgctttagtcggatcattgcttgattaaaataattattttc

SEQ ID NO: 62456 - DNA, 50 bp, synthetic construct
  source 1..50: mol_type = other DNA
caaaatacttttccgcatgacataattttgtgtttgctgccagttattac

SEQ ID NO: 62457 - DNA, 50 bp, synthetic construct
  source 1..50: mol_type = other DNA
attgtctataattagtacctattctactctcttcccatataatatctaat

SEQ ID NO: 62458 - DNA, 50 bp, synthetic construct
  source 1..50: mol_type = other DNA
gtagacccctattctacgggctttttcacaaacaaaacagaacgtacgtt

SEQ ID NO: 62459 - DNA, 50 bp, synthetic construct
  source 1..50: mol_type = other DNA
caaacaatagtaatgtttatatagatggaaataaacttccatatcttaaa

SEQ ID NO: 62460 - DNA, 50 bp, synthetic construct
  source 1..50: mol_type = other DNA
aatagttaataaaaaagccctttaattaatgaaattgattatttacattc

SEQ ID NO: 62461 - DNA, 50 bp, synthetic construct
  source 1..50: mol_type = other DNA
aaaagcgctcgtttccgagagttttaaaaatgaaagaaggtctcgcttct

SEQ ID NO: 62462 - DNA, 50 bp, synthetic construct
  source 1..50: mol_type = other DNA
gtaaccacgatacccgccagcatcaaagccggcgtggctttcggggattt

SEQ ID NO: 62463 - DNA, 50 bp, synthetic construct
  source 1..50: mol_type = other DNA
aaactccccctgcaaaaacggaatgctatgcgtcagagcggcacaaaccg

SEQ ID NO: 62464 - DNA, 50 bp, synthetic construct
  source 1..50: mol_type = other DNA
aagtagcgtttattgcttggacaattgggcggctgcatacggcgctagta

SEQ ID NO: 62465 - DNA, 50 bp, synthetic construct
  source 1..50: mol_type = other DNA
tataattttagtgaaaacctcatttaagtgcaatttttcacaatttaatc

SEQ ID NO: 62466 - DNA, 50 bp, synthetic construct
  source 1..50: mol_type = other DNA
attcaaataaaatgtggtgggttttaaaaccctcgacaatacagaaatgt

SEQ ID NO: 62467 - DNA, 50 bp, synthetic construct
  source 1..50: mol_type = other DNA
gcttatttacttggtttaatccaactttgccctatatttaacccataatc

SEQ ID NO: 62468 - DNA, 50 bp, synthetic construct
  source 1..50: mol_type = other DNA
ataatatttctacaaaatatattgcacaataagttttgccacaatattta

SEQ ID NO: 62469 - DNA, 50 bp, synthetic construct
  source 1..50: mol_type = other DNA
tagaaaaattttaataataataaaagtttatttgaattaagatttgactt

SEQ ID NO: 62470 - DNA, 50 bp, synthetic construct
  source 1..50: mol_type = other DNA
tttttgcaaaaactacgcatctcaaacgcaatgtgtagtgtttgcaaata

SEQ ID NO: 62471 - DNA, 50 bp, synthetic construct
  source 1..50: mol_type = other DNA
aaggagtgttcacatgctaaagatgagactgtagtgtcgctacgtcgaaa

SEQ ID NO: 62472 - DNA, 50 bp, synthetic construct
  source 1..50: mol_type = other DNA
ttacgtattcgtttgactaaattataacatttattttcaggtattattaa

SEQ ID NO: 62473 - DNA, 50 bp, synthetic construct
  source 1..50: mol_type = other DNA
agagaatgaatcgctcgatgaattataacatcaattaaactccatttcta

SEQ ID NO: 62474 - DNA, 50 bp, synthetic construct
  source 1..50: mol_type = other DNA
cctaagcttttgcgttaggtgtatatatacacctactttaaaattataca

SEQ ID NO: 62475 - DNA, 50 bp, synthetic construct
  source 1..50: mol_type = other DNA
actggagaatctattcctgatataggtagattaggcttagaaggtacacg

SEQ ID NO: 62476 - DNA, 50 bp, synthetic construct
  source 1..50: mol_type = other DNA
aaataaatacaaattttattcaaaacttaaaagaaaatttatataaaata

SEQ ID NO: 62477 - DNA, 50 bp, synthetic construct
  source 1..50: mol_type = other DNA
agagcaccttagcaatacgaagcccagccttcgtattgttaaggtgctta

SEQ ID NO: 62478 - DNA, 50 bp, synthetic construct
  source 1..50: mol_type = other DNA
atggatatagaattgaagatggaaaagaaaattgataaatgaatataaca

SEQ ID NO: 62479 - DNA, 50 bp, synthetic construct
  source 1..50: mol_type = other DNA
tttctatctctcttcttataatcatttgactatagaaatagatattacta

SEQ ID NO: 62480 - DNA, 50 bp, synthetic construct
  source 1..50: mol_type = other DNA
gaaaacccgttcgactgtagacttcaccgactatgcccctatcgttataa

SEQ ID NO: 62481 - DNA, 50 bp, synthetic construct
  source 1..50: mol_type = other DNA
cgttgaagccgtgcccggcgtccagcccgtggtcggcctcgtcggcaggc

SEQ ID NO: 62482 - DNA, 50 bp, synthetic construct
  source 1..50: mol_type = other DNA
cacgttcctgatgtggattctggccaggtagagaccacatctaaagtgtc

SEQ ID NO: 62483 - DNA, 50 bp, synthetic construct
  source 1..50: mol_type = other DNA
ctctaagctgttgtttcatgtatggccgcacacacgacaacaaagatcca

SEQ ID NO: 62484 - DNA, 50 bp, synthetic construct
  source 1..50: mol_type = other DNA
tttatttgccattaatcagtaccaagaagcaataatctatgctaatgtaa

SEQ ID NO: 62485 - DNA, 50 bp, synthetic construct
  source 1..50: mol_type = other DNA
tgtactttcataactttttaaagttttaggtgaaatattatgaaagtagc

SEQ ID NO: 62486 - DNA, 50 bp, synthetic construct
  source 1..50: mol_type = other DNA
cgaaaatcacctcgtcggaaacgacaccgtcacccgcgagggggacatcg

SEQ ID NO: 62487 - DNA, 50 bp, synthetic construct
  source 1..50: mol_type = other DNA
aatgcttcttttttgcgaaacctatctctcagacacaaaaaagagagcat

SEQ ID NO: 62488 - DNA, 50 bp, synthetic construct
  source 1..50: mol_type = other DNA
aggtcagttttatgacttgttgggttgcttatttttcgttaaactgacct

SEQ ID NO: 62489 - DNA, 50 bp, synthetic construct
  source 1..50: mol_type = other DNA
ctaatcgagagtaaatcctaccagaaataccgggattgggtcatgattat

SEQ ID NO: 62490 - DNA, 50 bp, synthetic construct
  source 1..50: mol_type = other DNA
cccaagcatggctggcaaaatagaaatctactttctaggccaaaataaat

SEQ ID NO: 62491 - DNA, 50 bp, synthetic construct
  source 1..50: mol_type = other DNA
tccaattgtcagtgttggacgagcgagcagacatgaaactactaacagga

SEQ ID NO: 62492 - DNA, 50 bp, synthetic construct
  source 1..50: mol_type = other DNA
ttccccgcttttgcggcacttctgagtccgtcgtactcaaaaatccaatg

SEQ ID NO: 62493 - DNA, 50 bp, synthetic construct
  source 1..50: mol_type = other DNA
ggacataaagtgaaactttaataagtttaatactccaccgtgtacacgta

SEQ ID NO: 62494 - DNA, 50 bp, synthetic construct
  source 1..50: mol_type = other DNA
tttttgcaaacactacacatctcaaatgtgatgtgtagggattgcaaaga

SEQ ID NO: 62495 - DNA, 50 bp, synthetic construct
  source 1..50: mol_type = other DNA
ataaaagtttaccgttatttatgatagtatatctaacggtaaaccaagag

SEQ ID NO: 62496 - DNA, 50 bp, synthetic construct
  source 1..50: mol_type = other DNA
acatcaattttatattttgtctatatgctgtgcgtggctaaaaagaatta

SEQ ID NO: 62497 - DNA, 50 bp, synthetic construct
  source 1..50: mol_type = other DNA
gtcgaaacagccaatacgacaggcttccctactatatttgttggaccgtg

SEQ ID NO: 62498 - DNA, 50 bp, synthetic construct
  source 1..50: mol_type = other DNA
acttcaataagttctttagaatgatggcattttaatcaatgaaaaaagca

SEQ ID NO: 62499 - DNA, 50 bp, synthetic construct
  source 1..50: mol_type = other DNA
ttatataagactaagaattttgaaaagaacaaattcttacgattattgaa

SEQ ID NO: 62500 - DNA, 50 bp, synthetic construct
  source 1..50: mol_type = other DNA
cgcgcacgcggtcacggttgcggtcgacgaagcccttcttcgcggcggcg

SEQ ID NO: 62501 - DNA, 50 bp, synthetic construct
  source 1..50: mol_type = other DNA
cgggctttggtgggacagcgtcaagccgcgcgctgttccgcccggccgat

SEQ ID NO: 62502 - DNA, 50 bp, synthetic construct
  source 1..50: mol_type = other DNA
atattgagcagcgagccaaggaactcattatggcattaagagctcaggat

SEQ ID NO: 62503 - DNA, 50 bp, synthetic construct
  source 1..50: mol_type = other DNA
gccttttagagcaacaaatggaaaaacatactcctgttgtagtaaaagga

SEQ ID NO: 62504 - DNA, 50 bp, synthetic construct
  source 1..50: mol_type = other DNA
ggatgaactgcctcgcccccacagcggccccggggcggagtagctcagtt

SEQ ID NO: 62505 - DNA, 50 bp, synthetic construct
  source 1..50: mol_type = other DNA
acaagaatttggaatttaagctaatgttagcttttatctcattcgtggga

SEQ ID NO: 62506 - DNA, 50 bp, synthetic construct
  source 1..50: mol_type = other DNA
tcagtagcgcttgttaggattcacagcatcctcataacaagcccaactgc

SEQ ID NO: 62507 - DNA, 50 bp, synthetic construct
  source 1..50: mol_type = other DNA
cgacaataacacgtctgtgttagtgcacaaacacacaacaaaaatggccc

SEQ ID NO: 62508 - DNA, 50 bp, synthetic construct
  source 1..50: mol_type = other DNA
gtgtaaacaattaactgtattatagctataatacagtaatatgtttacaa

SEQ ID NO: 62509 - DNA, 50 bp, synthetic construct
  source 1..50: mol_type = other DNA
tacggcatttcccccaagaactgcgagcagatattagtaaaaaggcctca

SEQ ID NO: 62510 - DNA, 50 bp, synthetic construct
  source 1..50: mol_type = other DNA
tactttacctgaaatgggttcagttaagatgtaatcacgatagtaagata

SEQ ID NO: 62511 - DNA, 50 bp, synthetic construct
  source 1..50: mol_type = other DNA
gtatacttccttattttaatgaactagtggcctaaaaacttgataaataa

SEQ ID NO: 62512 - DNA, 50 bp, synthetic construct
  source 1..50: mol_type = other DNA
aaaattaggactggatattaatcaagcgacctatagaaatggagaagaaa

SEQ ID NO: 62513 - DNA, 50 bp, synthetic construct
  source 1..50: mol_type = other DNA
atttgttgttaaatagtcaaattgtttcatttcaatataaaaacatccat

SEQ ID NO: 62514 - DNA, 50 bp, synthetic construct
  source 1..50: mol_type = other DNA
tctcctcttgatagtaataatgttattacattatgatcatcacgtatatc

SEQ ID NO: 62515 - DNA, 50 bp, synthetic construct
  source 1..50: mol_type = other DNA
aagatatagtagaatacaaatacaatttcatttgttaattctgataactt

SEQ ID NO: 62516 - DNA, 50 bp, synthetic construct
  source 1..50: mol_type = other DNA
taattatccccgtgtattccgcaatttttgctgatgagcggggataatcc

SEQ ID NO: 62517 - DNA, 50 bp, synthetic construct
  source 1..50: mol_type = other DNA
tttttgcagatactacacatcacatttgaaatgtgtagtgtttgcaaata

SEQ ID NO: 62518 - DNA, 50 bp, synthetic construct
  source 1..50: mol_type = other DNA
tttataaaatcctcctataataagtatttattcgtattattttttatata

SEQ ID NO: 62519 - DNA, 50 bp, synthetic construct
  source 1..50: mol_type = other DNA
ttcattaatcaaactcccttcttaatgaaaatatgaaactaccaaaagaa

SEQ ID NO: 62520 - DNA, 50 bp, synthetic construct
  source 1..50: mol_type = other DNA
aaaatgctaaacaagttaaaatgctattatttcaaaccgttcttctgcca

SEQ ID NO: 62521 - DNA, 50 bp, synthetic construct
  source 1..50: mol_type = other DNA
caaaactgagagtattcttttaattattttgaaaaaaatcttcaggtaaa

SEQ ID NO: 62522 - DNA, 50 bp, synthetic construct
  source 1..50: mol_type = other DNA
tataatcaaaaactccaatatgaatattctgatttacatattacgttagt

SEQ ID NO: 62523 - DNA, 50 bp, synthetic construct
  source 1..50: mol_type = other DNA
acgcactttacccaattaaatcaccttcaattttatggaagaaggtccgg

SEQ ID NO: 62524 - DNA, 50 bp, synthetic construct
  source 1..50: mol_type = other DNA
taatggtggaaatgattgtttatttagataaaaaagcatgatcatcacta

SEQ ID NO: 62525 - DNA, 50 bp, synthetic construct
  source 1..50: mol_type = other DNA
ctccttagcttagtaactattatatagcaaataagttacaaaaaccatta

SEQ ID NO: 62526 - DNA, 50 bp, synthetic construct
  source 1..50: mol_type = other DNA
gttcaattttccgctttactatcactaactagtaaagcgtcatcttgccc

SEQ ID NO: 62527 - DNA, 50 bp, synthetic construct
  source 1..50: mol_type = other DNA
tagaaaatgtagctaagttaataaaatttagaatggaagatgcgaaaatc

SEQ ID NO: 62528 - DNA, 50 bp, synthetic construct
  source 1..50: mol_type = other DNA
atatgtaaaaaaagtctttaacgaacctattaaagacgtcgaaaatgcca

SEQ ID NO: 62529 - DNA, 50 bp, synthetic construct
  source 1..50: mol_type = other DNA
cattgcacctttattaagagtactgatgctctcatcacaaaaatgcgatg

SEQ ID NO: 62530 - DNA, 50 bp, synthetic construct
  source 1..50: mol_type = other DNA
aaattacatattttcattataatttaaatagttatgaaatgattatattt

SEQ ID NO: 62531 - DNA, 50 bp, synthetic construct
  source 1..50: mol_type = other DNA
aaaaaataaatataagaattgattttaagagaatctaaaaaagatttttt

SEQ ID NO: 62532 - DNA, 50 bp, synthetic construct
  source 1..50: mol_type = other DNA
aatgttattatatcccaataaataagaatttattaatatattatttgata

SEQ ID NO: 62533 - DNA, 50 bp, synthetic construct
  source 1..50: mol_type = other DNA
tttatgtatttcaagaggttttgcccaataaacctcttataatccataaa

SEQ ID NO: 62534 - DNA, 50 bp, synthetic construct
  source 1..50: mol_type = other DNA
gcctccaagagctataaatcagtatagattgccagttaactcttggagtt

SEQ ID NO: 62535 - DNA, 50 bp, synthetic construct
  source 1..50: mol_type = other DNA
tcgatattacctacttctttctctattaagaaggaggttccacctatgaa

SEQ ID NO: 62536 - DNA, 50 bp, synthetic construct
  source 1..50: mol_type = other DNA
taaatttgattggatttaataatgttcagtattaaataatcttaaacctg

SEQ ID NO: 62537 - DNA, 50 bp, synthetic construct
  source 1..50: mol_type = other DNA
tagtgcaactcataagaacataggtctctatataaataatagtgaatttg

SEQ ID NO: 62538 - DNA, 50 bp, synthetic construct
  source 1..50: mol_type = other DNA
tccaaataaaaaaatctttttattttggaaataagcaccctatattatag

SEQ ID NO: 62539 - DNA, 50 bp, synthetic construct
  source 1..50: mol_type = other DNA
ttcttgctgaattacaagaaatgaatatatctattgcaattttacaaaaa

SEQ ID NO: 62540 - DNA, 50 bp, synthetic construct
  source 1..50: mol_type = other DNA
cctggtcaccacgggggccacggagggtcagggaacccagacgcaccagg

SEQ ID NO: 62541 - DNA, 50 bp, synthetic construct
  source 1..50: mol_type = other DNA
tgtggtccttataatgaaaatagctcgcagtttttaggagaaatgccgta

SEQ ID NO: 62542 - DNA, 50 bp, synthetic construct
  source 1..50: mol_type = other DNA
ggatagtggggacgccgacgtcgcgggagaccagcacgtaaccctgatcg

SEQ ID NO: 62543 - DNA, 50 bp, synthetic construct
  source 1..50: mol_type = other DNA
atcggcaagcatacgcgggtgtgacgtcacacgcgtgtgcttgctggtta

SEQ ID NO: 62544 - DNA, 50 bp, synthetic construct
  source 1..50: mol_type = other DNA
atagatatagtaaggtttcatagtatcatagaaaacattacaattaaaac

SEQ ID NO: 62545 - DNA, 50 bp, synthetic construct
  source 1..50: mol_type = other DNA
cttcttataatcattttctattctataaaatatataatattaagccagcc

SEQ ID NO: 62546 - DNA, 50 bp, synthetic construct
  source 1..50: mol_type = other DNA
aactttcccctttaatactaaaattaaacttgagctttaacgggaaagat

SEQ ID NO: 62547 - DNA, 50 bp, synthetic construct
  source 1..50: mol_type = other DNA
aagggcggccgccgcggccgcaggccgcctcgatcgagatggcgtcccgc

SEQ ID NO: 62548 - DNA, 50 bp, synthetic construct
  source 1..50: mol_type = other DNA
gcgccctccgccatcttgttcgcggccgagaacttgatggcggctggctt

SEQ ID NO: 62549 - DNA, 50 bp, synthetic construct
  source 1..50: mol_type = other DNA
tggtcatgaccgacgttgacggcgatcgacgtgcacgtcgccgatctcca

SEQ ID NO: 62550 - DNA, 50 bp, synthetic construct
  source 1..50: mol_type = other DNA
ttgcccagcaaccatgcgttgatcgagatcaacgccaaccacctgcgcgc

SEQ ID NO: 62551 - DNA, 50 bp, synthetic construct
  source 1..50: mol_type = other DNA
ttttatcttagtgttctaatgtatcattattatataacactaaaataaat

SEQ ID NO: 62552 - DNA, 50 bp, synthetic construct
  source 1..50: mol_type = other DNA
catcttggcatcacgtaacaagcaacaatgcatcgggatcgtcaagcatg

SEQ ID NO: 62553 - DNA, 50 bp, synthetic construct
  source 1..50: mol_type = other DNA
gaaaaaaggccctgtacctttgtaaacactaagggtataggtcttttttc

SEQ ID NO: 62554 - DNA, 50 bp, synthetic construct
  source 1..50: mol_type = other DNA
ttatatcatttaaaatatttcttaataaataatagttaaaaaagatttaa

SEQ ID NO: 62555 - DNA, 50 bp, synthetic construct
  source 1..50: mol_type = other DNA
gtcccaaataaaatcagtgataacatgttgtcactgaggaagtttcggaa

SEQ ID NO: 62556 - DNA, 50 bp, synthetic construct
  source 1..50: mol_type = other DNA
attctccaaaacgagaattacaccgggctgtagcgtacaatgtggatgat

SEQ ID NO: 62557 - DNA, 50 bp, synthetic construct
  source 1..50: mol_type = other DNA
aatttacgccggactttgtttataattgtgaacaaagtccggtatttttt

SEQ ID NO: 62558 - DNA, 50 bp, synthetic construct
  source 1..50: mol_type = other DNA
atttttagacttgtcccaagatgtgaacccactggtacagaactcgaact

SEQ ID NO: 62559 - DNA, 50 bp, synthetic construct
  source 1..50: mol_type = other DNA
tcaatatagtttaaaagatgctttttgcagaatctttttgcatatatatt

SEQ ID NO: 62560 - DNA, 50 bp, synthetic construct
  source 1..50: mol_type = other DNA
ttataagcaggcaaagtcgtcaatatataaaggactatgtggtagtgtat

SEQ ID NO: 62561 - DNA, 50 bp, synthetic construct
  source 1..50: mol_type = other DNA
cgtaatcggccgtgcatcggattatgggagccgtgtcacagccgggtaca

SEQ ID NO: 62562 - DNA, 50 bp, synthetic construct
  source 1..50: mol_type = other DNA
cagcaagcgcatagacaacttcgccccctccgtagtcgctgcgctaagcc

SEQ ID NO: 62563 - DNA, 50 bp, synthetic construct
  source 1..50: mol_type = other DNA
gcgttcgcctcgctcggcacgtagactcgctcaacgtcttctttacgcgg

SEQ ID NO: 62564 - DNA, 50 bp, synthetic construct
  source 1..50: mol_type = other DNA
tggcagcgtctttcgcatcgtcgctggcggggatcgcggtgactgtgcgg

SEQ ID NO: 62565 - DNA, 50 bp, synthetic construct
  source 1..50: mol_type = other DNA
cacctcgatgttccaagacgcgatgacgcatctcacgcgacaccgaagtg

SEQ ID NO: 62566 - DNA, 50 bp, synthetic construct
  source 1..50: mol_type = other DNA
tcgtaatctccaagccggtcaacacgagttgactggcagaatttggtgga

SEQ ID NO: 62567 - DNA, 50 bp, synthetic construct
  source 1..50: mol_type = other DNA
agtgcgtaaattatcaaaacgttaatttcaaggttatcagagagagcaaa

SEQ ID NO: 62568 - DNA, 50 bp, synthetic construct
  source 1..50: mol_type = other DNA
cgaagccacaacaagcgggttgcaaaagcgaccccaccgctttggcttca

SEQ ID NO: 62569 - DNA, 50 bp, synthetic construct
  source 1..50: mol_type = other DNA
tctttctattttgttactgccatatgtatggtcgtaactaattagaacgc

SEQ ID NO: 62570 - DNA, 50 bp, synthetic construct
  source 1..50: mol_type = other DNA
aggcttttgaaaccatgatcaaagaaatttaattaactttaccaaatata

SEQ ID NO: 62571 - DNA, 50 bp, synthetic construct
  source 1..50: mol_type = other DNA
tcagtcgagaccaggcgggtcgatcgcggacatggcctatctccatgtcg

SEQ ID NO: 62572 - DNA, 50 bp, synthetic construct
  source 1..50: mol_type = other DNA
ggcaggtcgagggtgaccaatcgaggtaatcccgtcaagcttgtccatct

SEQ ID NO: 62573 - DNA, 50 bp, synthetic construct
  source 1..50: mol_type = other DNA
ttcaagctccagaaattgctcaacattttgtaccaggttgcatgcttgaa

SEQ ID NO: 62574 - DNA, 50 bp, synthetic construct
  source 1..50: mol_type = other DNA
actcacataaattgaactaaagtttaaactagtcttctattctattgagg

SEQ ID NO: 62575 - DNA, 50 bp, synthetic construct
  source 1..50: mol_type = other DNA
cgaccattaccgtagccgacaacggcctttgcgtcgaacgatcatggccg

SEQ ID NO: 62576 - DNA, 50 bp, synthetic construct
  source 1..50: mol_type = other DNA
gaacgtctatcaaaaaagctcataatttaatacttttagcgtagttcttc

SEQ ID NO: 62577 - DNA, 50 bp, synthetic construct
  source 1..50: mol_type = other DNA
ttttcccatttcaactgaatcacaaagctgtttccaccaaaatgggaaca

SEQ ID NO: 62578 - DNA, 50 bp, synthetic construct
  source 1..50: mol_type = other DNA
taccaacccctagattgtatcgctttagcactacaacggttttcattacg

SEQ ID NO: 62579 - DNA, 50 bp, synthetic construct
  source 1..50: mol_type = other DNA
gtaccagcattactaagcacttttgagaaagggcttgttaaagctggtga

SEQ ID NO: 62580 - DNA, 50 bp, synthetic construct
  source 1..50: mol_type = other DNA
taccgttacgttgaaagtgtctcaaaagcgatacaatctaggtatcagtt

SEQ ID NO: 62581 - DNA, 50 bp, synthetic construct
  source 1..50: mol_type = other DNA
cataaacaaagaaaggatgaaacataagtttcctcctttgtttgtttgtg

SEQ ID NO: 62582 - DNA, 50 bp, synthetic construct
  source 1..50: mol_type = other DNA
aatctttcctatcttcttttacttatgagtaataagggaaaggaggaatt

SEQ ID NO: 62583 - DNA, 50 bp, synthetic construct
  source 1..50: mol_type = other DNA
tttcaaaactcccaagaaatgaggactgtaagtacttaaagttatagaaa

SEQ ID NO: 62584 - DNA, 50 bp, synthetic construct
  source 1..50: mol_type = other DNA
tttacgttaacgatctagtctaggtttaaagaataaagaattattatata

SEQ ID NO: 62585 - DNA, 50 bp, synthetic construct
  source 1..50: mol_type = other DNA
acccgacggcataatcgccatcgggtctttcggcagagtcagcgtcaggt

SEQ ID NO: 62586 - DNA, 50 bp, synthetic construct
  source 1..50: mol_type = other DNA
taagataaataagaaaataaataagaaaaattatattgaggttaatgcta

SEQ ID NO: 62587 - DNA, 50 bp, synthetic construct
  source 1..50: mol_type = other DNA
taatacattatttgtgatataataagtattttagtataattaaattattg

SEQ ID NO: 62588 - DNA, 50 bp, synthetic construct
  source 1..50: mol_type = other DNA
atgagatgcttggtctagaatttcatgagttattacgggaatatgtccat

SEQ ID NO: 62589 - DNA, 50 bp, synthetic construct
  source 1..50: mol_type = other DNA
tcgtgggaatgtaccaggattgaaattttcatctaaaatcatgaaatcag

SEQ ID NO: 62590 - DNA, 50 bp, synthetic construct
  source 1..50: mol_type = other DNA
aactagtccctttatcatcataataaccatagacacgttgtccactatca

SEQ ID NO: 62591 - DNA, 50 bp, synthetic construct
  source 1..50: mol_type = other DNA
tgtatcacacctttattgagaaaatattttagaagggaacgaatgatcta

SEQ ID NO: 62592 - DNA, 50 bp, synthetic construct
  source 1..50: mol_type = other DNA
tatgtcaacaacactaaaagattcatcattcttttacttttttgaattga

SEQ ID NO: 62593 - DNA, 50 bp, synthetic construct
  source 1..50: mol_type = other DNA
aaaaatatgcctggagcccagttccggaagtggtctttgctgtccttttt

SEQ ID NO: 62594 - DNA, 50 bp, synthetic construct
  source 1..50: mol_type = other DNA
taaagcggttattcaggaagatgatgtcatctttataaataactcccgta

SEQ ID NO: 62595 - DNA, 50 bp, synthetic construct
  source 1..50: mol_type = other DNA
ttgaagtgagtctttaatataggatatagtatgccgatagaccaaaaacc

SEQ ID NO: 62596 - DNA, 50 bp, synthetic construct
  source 1..50: mol_type = other DNA
acggcaaaacttcatgagcctgttgcaaagaccgcttgattttttggatt

SEQ ID NO: 62597 - DNA, 50 bp, synthetic construct
  source 1..50: mol_type = other DNA
tggaattgaatatctagagcatacaatgatcggttcaatgttcaatatta

SEQ ID NO: 62598 - DNA, 50 bp, synthetic construct
  source 1..50: mol_type = other DNA
accgaatagtagacggtaaagcggttcagctttctttatagctgttgtac

SEQ ID NO: 62599 - DNA, 50 bp, synthetic construct
  source 1..50: mol_type = other DNA
aagggcatcgtaaaagctaaaagaattcttttttctagttcagctttctt

SEQ ID NO: 62600 - DNA, 50 bp, synthetic construct
  source 1..50: mol_type = other DNA
acaataggcatagaaaagaagccttaaaacttccattctatctctatttt

SEQ ID NO: 62601 - DNA, 50 bp, synthetic construct
  source 1..50: mol_type = other DNA
tcctccttgatggcaaaacgaagcatgttgggctttcagtcccgatcacg

SEQ ID NO: 62602 - DNA, 50 bp, synthetic construct
  source 1..50: mol_type = other DNA
tgttgtactaactataacgcacctacaggagcgttatagttagtacaaca

SEQ ID NO: 62603 - DNA, 50 bp, synthetic construct
  source 1..50: mol_type = other DNA
cttattactaaaagagcctatcccttgttgaagcaaagcttgctgaaggt

SEQ ID NO: 62604 - DNA, 50 bp, synthetic construct
  source 1..50: mol_type = other DNA
caagagccttgctgcgctgctcgatcaagataggcgccgcgttggcctgt

SEQ ID NO: 62605 - DNA, 50 bp, synthetic construct
  source 1..50: mol_type = other DNA
atcgttgttccgaagtggcggagcgggccacgcccgatgaagatgagcac

SEQ ID NO: 62606 - DNA, 50 bp, synthetic construct
  source 1..50: mol_type = other DNA
tgctagggactcgggcttttggaccggacgaaagcgatgaatatgaatcg

SEQ ID NO: 62607 - DNA, 50 bp, synthetic construct
  source 1..50: mol_type = other DNA
aatgacttaatctaaattctataacattaaagaaaatacaaaaggtcatt

SEQ ID NO: 62608 - DNA, 50 bp, synthetic construct
  source 1..50: mol_type = other DNA
ttacttctttatcgcacatcagcaaatgctcatgtacggtaaggaagcaa

SEQ ID NO: 62609 - DNA, 50 bp, synthetic construct
  source 1..50: mol_type = other DNA
cagcaggcgtgttttcttattttatgatagttgagagtgctttcctgctg

SEQ ID NO: 62610 - DNA, 50 bp, synthetic construct
  source 1..50: mol_type = other DNA
ggcttggggagggcgtaatgattgccatatcaaactttgatatgtacccc

SEQ ID NO: 62611 - DNA, 50 bp, synthetic construct
  source 1..50: mol_type = other DNA
gggtgcggagcgagaactgctggagatccagccagcttctgtgaaccccc

SEQ ID NO: 62612 - DNA, 50 bp, synthetic construct
  source 1..50: mol_type = other DNA
caacccatatcctcgcgctcggggaacggtatcttgaatctaatgggttg

SEQ ID NO: 62613 - DNA, 50 bp, synthetic construct
  source 1..50: mol_type = other DNA
gatcagggttacccagttccaatgttcattatagcacagtttcccggatc

SEQ ID NO: 62614 - DNA, 50 bp, synthetic construct
  source 1..50: mol_type = other DNA
catgtgcagggtgtgggcttcaaagttccttgatacacaccttgcccatc

SEQ ID NO: 62615 - DNA, 50 bp, synthetic construct
  source 1..50: mol_type = other DNA
acgatgccctttataaagaaggagatctccacctgaataaaataagtaaa

SEQ ID NO: 62616 - DNA, 50 bp, synthetic construct
  source 1..50: mol_type = other DNA
gacgacgcgcggtgcgcagcaggcgcgcgcgctgggccccgaggctggtg

SEQ ID NO: 62617 - DNA, 50 bp, synthetic construct
  source 1..50: mol_type = other DNA
cttttcttcttcatttcattcatattatgtcagacaatgaagaagaaata

SEQ ID NO: 62618 - DNA, 50 bp, synthetic construct
  source 1..50: mol_type = other DNA
aacccattgcttgtttcatcctgtttaaaaaatggaatttacaattagaa

SEQ ID NO: 62619 - DNA, 50 bp, synthetic construct
  source 1..50: mol_type = other DNA
atctgatgtatgatctatgcggcaatacctttttacatataattacatag

SEQ ID NO: 62620 - DNA, 50 bp, synthetic construct
  source 1..50: mol_type = other DNA
ccgcaagctacgggtggcagcctatgaagcgggccacgcgcctctgccgc

SEQ ID NO: 62621 - DNA, 50 bp, synthetic construct
  source 1..50: mol_type = other DNA
gggcgtggattatctgctgcgcggcgggaaacagcacacgtaaatcctct

SEQ ID NO: 62622 - DNA, 50 bp, synthetic construct
  source 1..50: mol_type = other DNA
catcgcgctctccgccccaccataaacatgaaattaagtagagcaaggac

SEQ ID NO: 62623 - DNA, 50 bp, synthetic construct
  source 1..50: mol_type = other DNA
ttggtcaaaacagcacacactatacgtacccggtaggctttttcttgcgt

SEQ ID NO: 62624 - DNA, 50 bp, synthetic construct
  source 1..50: mol_type = other DNA
atttaaataagaagactcttcggttaaaaaaatagtcttctcattaaaaa

SEQ ID NO: 62625 - DNA, 50 bp, synthetic construct
  source 1..50: mol_type = other DNA
gtgccttgtctcgggcttgccggatgtcaacagggcgcgtgaaaacgagg

SEQ ID NO: 62626 - DNA, 50 bp, synthetic construct
  source 1..50: mol_type = other DNA
gaatacgctcgccattggcgggttggatcgcgattttggaaagtctattg

SEQ ID NO: 62627 - DNA, 50 bp, synthetic construct
  source 1..50: mol_type = other DNA
accatttggcctaaattatcctaatggaaggattatcttcgaaccgtctg

SEQ ID NO: 62628 - DNA, 50 bp, synthetic construct
  source 1..50: mol_type = other DNA
cggctccttagatgcgatctttttcagtcttactcagatcgaatctcctg

SEQ ID NO: 62629 - DNA, 50 bp, synthetic construct
  source 1..50: mol_type = other DNA
tatgacagtcactttttttgccatgcttgataagaaaacactaaaggcat

SEQ ID NO: 62630 - DNA, 50 bp, synthetic construct
  source 1..50: mol_type = other DNA
cgcgctgggaagcgaggaagcccacctgggcgctgtagctggtaagctgc

SEQ ID NO: 62631 - DNA, 50 bp, synthetic construct
  source 1..50: mol_type = other DNA
gcggcggccggttgcgggttatcccccgtcccgcctcgtgcggccggacg

SEQ ID NO: 62632 - DNA, 50 bp, synthetic construct
  source 1..50: mol_type = other DNA
cagcttatgcccgtgtttcaacagaattgtctccttacgcacgtaaagaa

SEQ ID NO: 62633 - DNA, 50 bp, synthetic construct
  source 1..50: mol_type = other DNA
ataggtcggttctatgtctttcaaattggaaagacaaaagtcgttcagaa

SEQ ID NO: 62634 - DNA, 50 bp, synthetic construct
  source 1..50: mol_type = other DNA
gcctcatcttttcagtgttacttacacatgtaacactgatcccctgttac

SEQ ID NO: 62635 - DNA, 50 bp, synthetic construct
  source 1..50: mol_type = other DNA
tcgtgcattcaatcaccttaacacttgcagaaactcccggcgcctcgggt

SEQ ID NO: 62636 - DNA, 50 bp, synthetic construct
  source 1..50: mol_type = other DNA
ttcttctctgctttcttcggttcagcaatacagaaagcaatggagaagaa

SEQ ID NO: 62637 - DNA, 50 bp, synthetic construct
  source 1..50: mol_type = other DNA
accaaaagacacgccctgccttgattccattcttgccgtggtctggtcgt

SEQ ID NO: 62638 - DNA, 50 bp, synthetic construct
  source 1..50: mol_type = other DNA
ttgacaaataaccttacatgtattattgtctttcaaagggtttttatttt

SEQ ID NO: 62639 - DNA, 50 bp, synthetic construct
  source 1..50: mol_type = other DNA
cctgcattaatcaaccccacaatccagatgttgaggtgtattaattgaca

SEQ ID NO: 62640 - DNA, 50 bp, synthetic construct
  source 1..50: mol_type = other DNA
gcagttgggcttgttatgaggatgctattaatcctaacaagcgctactga

SEQ ID NO: 62641 - DNA, 50 bp, synthetic construct
  source 1..50: mol_type = other DNA
aactacgccgcctgaacggccccggctgaccccatctggcgtcagtagcg

SEQ ID NO: 62642 - DNA, 50 bp, synthetic construct
  source 1..50: mol_type = other DNA
aaaagcctacataaccatccattttaataccacattttatatattttttt

SEQ ID NO: 62643 - DNA, 50 bp, synthetic construct
  source 1..50: mol_type = other DNA
ggtggcggcatatgcccgcgtatctatgaaaatcgctgtaggcaacagcc

SEQ ID NO: 62644 - DNA, 50 bp, synthetic construct
  source 1..50: mol_type = other DNA
atgaccattcctacacgaaaggcagaagcggcggggtacccaatcgtgat

SEQ ID NO: 62645 - DNA, 50 bp, synthetic construct
  source 1..50: mol_type = other DNA
atctttgacgaaacttaatgggtaattaagaccgatttttgcataacttt

SEQ ID NO: 62646 - DNA, 50 bp, synthetic construct
  source 1..50: mol_type = other DNA
tcaaagtgtattacatcggtgaagtggcttctgtgagtatttgtcaaggt

SEQ ID NO: 62647 - DNA, 50 bp, synthetic construct
  source 1..50: mol_type = other DNA
tagtattcattttacctccttcccatcataagagctaaaacaccaatatc

SEQ ID NO: 62648 - DNA, 50 bp, synthetic construct
  source 1..50: mol_type = other DNA
agtaatcgttgacgaacaggaagcggacttcgagagggtcaacgaggaga

SEQ ID NO: 62649 - DNA, 50 bp, synthetic construct
  source 1..50: mol_type = other DNA
accccgcatcactggtttcagtggtgcccctgaaaacagggaatagagaa

SEQ ID NO: 62650 - DNA, 50 bp, synthetic construct
  source 1..50: mol_type = other DNA
atatataagtgaaggcctccgggtaaagccggacgccccttctgtgggag

SEQ ID NO: 62651 - DNA, 50 bp, synthetic construct
  source 1..50: mol_type = other DNA
cacaagaagtttctgcaaaagttgctgccgaactgcatggtgatgttgtt

SEQ ID NO: 62652 - DNA, 50 bp, synthetic construct
  source 1..50: mol_type = other DNA
ggtgatgtggttaggggtagctactgacagcttgtgctaagcaaatagcc

SEQ ID NO: 62653 - DNA, 50 bp, synthetic construct
  source 1..50: mol_type = other DNA
aaaaaatccgattggaatgggagttttgttcatatccacagttatttttt

SEQ ID NO: 62654 - DNA, 50 bp, synthetic construct
  source 1..50: mol_type = other DNA
gtttgcgatcaaaattatatgttggtatagatatgggaattatcataaac

SEQ ID NO: 62655 - DNA, 50 bp, synthetic construct
  source 1..50: mol_type = other DNA
ttaactcaacaacctgctcaattgttcagcgtagcaggtatcgtggttac

SEQ ID NO: 62656 - DNA, 50 bp, synthetic construct
  source 1..50: mol_type = other DNA
gaaaccattttcctctggcaatccggcgatggcttctggagcctgattcc

SEQ ID NO: 62657 - DNA, 50 bp, synthetic construct
  source 1..50: mol_type = other DNA
tcctccaaccacttatccacggccttcagctatcattatcttctggaggt

SEQ ID NO: 62658 - DNA, 50 bp, synthetic construct
  source 1..50: mol_type = other DNA
ggctgcttcgccaccgccaccaaccgccggatagcttcggaaaaacagtg

SEQ ID NO: 62659 - DNA, 50 bp, synthetic construct
  source 1..50: mol_type = other DNA
tttcaatgctggaaatacgcaaaaggtttaaaatagttgcgcactacaag

SEQ ID NO: 62660 - DNA, 50 bp, synthetic construct
  source 1..50: mol_type = other DNA
cgtcaggcgaaccttatcattctgcacacgccagaaaggagtgcgtaatg

SEQ ID NO: 62661 - DNA, 50 bp, synthetic construct
  source 1..50: mol_type = other DNA
caagctatcttattttgagtactttgaactactcccactctactattttt

SEQ ID NO: 62662 - DNA, 50 bp, synthetic construct
  source 1..50: mol_type = other DNA
gatcacagcggtgggcataggcaggaatggctatggcaaaatatgtatat

SEQ ID NO: 62663 - DNA, 50 bp, synthetic construct
  source 1..50: mol_type = other DNA
ttaaaaagacaattaaggtcacattaaaaattattttattgtctttttat

SEQ ID NO: 62664 - DNA, 50 bp, synthetic construct
  source 1..50: mol_type = other DNA
atgaaccgccccggttttcctggagatcgaggaaggcttcgttgtttttg

SEQ ID NO: 62665 - DNA, 50 bp, synthetic construct
  source 1..50: mol_type = other DNA
aaattatatgaattaatataatattaattctgtcttgcactttatcatca

SEQ ID NO: 62666 - DNA, 50 bp, synthetic construct
  source 1..50: mol_type = other DNA
gcaaaaatagagtttaaagacgaaagttcatctttaaatgataatcaatt

SEQ ID NO: 62667 - DNA, 50 bp, synthetic construct
  source 1..50: mol_type = other DNA
cccctaccgcgtattataacgataggggacgttctacggcttactgatgg

SEQ ID NO: 62668 - DNA, 50 bp, synthetic construct
  source 1..50: mol_type = other DNA
tccgtaaagcattccccgacttaagcttttcagtaattatctttttagca

SEQ ID NO: 62669 - DNA, 50 bp, synthetic construct
  source 1..50: mol_type = other DNA
tgtttcttttatcttctaaaacacttgtctttttaaataaaaattaaaca

SEQ ID NO: 62670 - DNA, 50 bp, synthetic construct
  source 1..50: mol_type = other DNA
ctttgctctcatttctggggtccagctgtttcttgacgacgccgaatacg

SEQ ID NO: 62671 - DNA, 50 bp, synthetic construct
  source 1..50: mol_type = other DNA
cgatgttatcaagcgggtgtcggacagcctcgttgcgaatgatcgcatca

SEQ ID NO: 62672 - DNA, 50 bp, synthetic construct
  source 1..50: mol_type = other DNA
gtggtgagatataatttttgtttaattaaacataaaattagccatgatgt

SEQ ID NO: 62673 - DNA, 50 bp, synthetic construct
  source 1..50: mol_type = other DNA
agattgtatcgttttagatggtgtatgctaaagatacccctataccatca

SEQ ID NO: 62674 - DNA, 50 bp, synthetic construct
  source 1..50: mol_type = other DNA
gcgcttgttaggattcacagacagccttctctgtgatacctgagaaggta

SEQ ID NO: 62675 - DNA, 50 bp, synthetic construct
  source 1..50: mol_type = other DNA
tatttaaacgtgtctaataaaaatcaatttttattttgatgaatttttct

SEQ ID NO: 62676 - DNA, 50 bp, synthetic construct
  source 1..50: mol_type = other DNA
aattacagaacgattcttcaaaaggtactttgaagaagctttctgtgaac

SEQ ID NO: 62677 - DNA, 50 bp, synthetic construct
  source 1..50: mol_type = other DNA
ttgtattctcaaggaacagacaacacttttgtccaaactcgatgtcgata

SEQ ID NO: 62678 - DNA, 50 bp, synthetic construct
  source 1..50: mol_type = other DNA
ctactccttactgccacttcggatcgatatcctgcacgatcagggagccg

SEQ ID NO: 62679 - DNA, 50 bp, synthetic construct
  source 1..50: mol_type = other DNA
aacctccaccggcgtgacggcggcaacgggccggaatcaatttctctgca

SEQ ID NO: 62680 - DNA, 50 bp, synthetic construct
  source 1..50: mol_type = other DNA
gaaacgacgttccaatcggcgttgtcgatatccgggtgtagcgcagtttt

SEQ ID NO: 62681 - DNA, 50 bp, synthetic construct
  source 1..50: mol_type = other DNA
tacttcaacgacagccattacatgctcttgcaatgggtgtattttttata

SEQ ID NO: 62682 - DNA, 50 bp, synthetic construct
  source 1..50: mol_type = other DNA
ggtacatagacaataacggtttcctttagaagtaatatgtcacactgcaa

SEQ ID NO: 62683 - DNA, 50 bp, synthetic construct
  source 1..50: mol_type = other DNA
gattggagcctgataccgcttttcatgaaagcagccgccaatcaaaaagc

SEQ ID NO: 62684 - DNA, 50 bp, synthetic construct
  source 1..50: mol_type = other DNA
aaaaaatacacctcttgtcaggacatctcgccgccgttactgcatttttt

SEQ ID NO: 62685 - DNA, 50 bp, synthetic construct
  source 1..50: mol_type = other DNA
tttggtatcccgtttcttctccctccaacgagagataacgagatactaaa

SEQ ID NO: 62686 - DNA, 50 bp, synthetic construct
  source 1..50: mol_type = other DNA
agaaaagccttatggctttctttatttctgtaaagatgtaatgctttttt

SEQ ID NO: 62687 - DNA, 50 bp, synthetic construct
  source 1..50: mol_type = other DNA
gctcctgttgcaccgtatttatccagcgataagtacgaaatcgcatcgga

SEQ ID NO: 62688 - DNA, 50 bp, synthetic construct
  source 1..50: mol_type = other DNA
taagatagtctcagaaacagattacagaaaataagtgtgatcgcaataac

SEQ ID NO: 62689 - DNA, 50 bp, synthetic construct
  source 1..50: mol_type = other DNA
tcatttcaccaaagaggtcaagtcatgccgagttatctttggatactata

SEQ ID NO: 62690 - DNA, 50 bp, synthetic construct
  source 1..50: mol_type = other DNA
ctttccgaggttcatccgtttcacacgggcaacggcagaaaggtggaaag

SEQ ID NO: 62691 - DNA, 50 bp, synthetic construct
  source 1..50: mol_type = other DNA
tatcaagtcaccgggcggcaaagacattattatccgaaaatgacttgata

SEQ ID NO: 62692 - DNA, 50 bp, synthetic construct
  source 1..50: mol_type = other DNA
ggcggccacccgaaaacgaagggtcgctcattcagagttacatcaccgcc

SEQ ID NO: 62693 - DNA, 50 bp, synthetic construct
  source 1..50: mol_type = other DNA
gacagcctgcgggcttttctctatacaaagggcagctataccaagctgaa

SEQ ID NO: 62694 - DNA, 50 bp, synthetic construct
  source 1..50: mol_type = other DNA
cggcggaggctttacggcttccgccgtgccgctttttgcgtcctttgcct

SEQ ID NO: 62695 - DNA, 50 bp, synthetic construct
  source 1..50: mol_type = other DNA
ttcgtcgttatggtactccagaagctcttcgagaacatcctcttgaagga

SEQ ID NO: 62696 - DNA, 50 bp, synthetic construct
  source 1..50: mol_type = other DNA
tctaaattgctttgattatggtgatatcaccaataaaatccagcattggt

SEQ ID NO: 62697 - DNA, 50 bp, synthetic construct
  source 1..50: mol_type = other DNA
ttggcggtccgcgctgctcccggccgctgccgatgagcgcggcgctccag

SEQ ID NO: 62698 - DNA, 50 bp, synthetic construct
  source 1..50: mol_type = other DNA
tatttttatttaaattagttgtaaaagaaagactaaattttccataggat

SEQ ID NO: 62699 - DNA, 50 bp, synthetic construct
  source 1..50: mol_type = other DNA
aattcgtctatcaattgtttgcggcacaataaacaattgtaatactaaaa

SEQ ID NO: 62700 - DNA, 50 bp, synthetic construct
  source 1..50: mol_type = other DNA
tgtttagagttccatctgggtttgcagaaaaagagcaggcaccctacatt

SEQ ID NO: 62701 - DNA, 50 bp, synthetic construct
  source 1..50: mol_type = other DNA
tcatcagctggagtgaaaaagctgtccatcttttatttgatagccaatgg

SEQ ID NO: 62702 - DNA, 50 bp, synthetic construct
  source 1..50: mol_type = other DNA
ttgtgggaaagcagtacaaccgtctcggctggagaacacatttccccagc

SEQ ID NO: 62703 - DNA, 50 bp, synthetic construct
  source 1..50: mol_type = other DNA
acttgacattgtggcaaagagctgatatgccatacttgttgatgaagagt

SEQ ID NO: 62704 - DNA, 50 bp, synthetic construct
  source 1..50: mol_type = other DNA
cttgaacatgaattaaaaactcatatatgcactgtaaattcaagtaaaaa

SEQ ID NO: 62705 - DNA, 50 bp, synthetic construct
  source 1..50: mol_type = other DNA
ctcctttttatgctcaatcacatcattaagggattgtatgtaggcggaag

SEQ ID NO: 62706 - DNA, 50 bp, synthetic construct
  source 1..50: mol_type = other DNA
gaaaaagcaaaattaaaaaagaaggagctctgtatgcggcgacttttagc

SEQ ID NO: 62707 - DNA, 50 bp, synthetic construct
  source 1..50: mol_type = other DNA
gaaaattagtaaatttcaaaaaattatcctcgacgagcataatctttttc

SEQ ID NO: 62708 - DNA, 50 bp, synthetic construct
  source 1..50: mol_type = other DNA
ttaggttgttagggtcaatggtgcggggtaccacgatagccttacccaaa

SEQ ID NO: 62709 - DNA, 50 bp, synthetic construct
  source 1..50: mol_type = other DNA
ccggcgcatgcgcggccgcaagacgggcctaccggcggccaaggcggcgg

SEQ ID NO: 62710 - DNA, 50 bp, synthetic construct
  source 1..50: mol_type = other DNA
gtttttcttcgtggcggccttgttcagacatgcgctgcaacaacaactgc

SEQ ID NO: 62711 - DNA, 50 bp, synthetic construct
  source 1..50: mol_type = other DNA
gtttttctgcgtggaggccttgttcagacatgcgctgcaacaacaactgc

SEQ ID NO: 62712 - DNA, 50 bp, synthetic construct
  source 1..50: mol_type = other DNA
cgataaagaatatgtattctatagtaaagtaaaatacatatcttgcatca

SEQ ID NO: 62713 - DNA, 50 bp, synthetic construct
  source 1..50: mol_type = other DNA
ttggggcgaggttcaagagtagggcccacttgggccaaattcaaaccttc

SEQ ID NO: 62714 - DNA, 50 bp, synthetic construct
  source 1..50: mol_type = other DNA
gatcacgcggctgacggaacaaccgaggctgcgccctgactagggtggtt

SEQ ID NO: 62715 - DNA, 50 bp, synthetic construct
  source 1..50: mol_type = other DNA
gtcatttaaaggggtcctacgatatttaagggttattctataaaaatgtt

SEQ ID NO: 62716 - DNA, 50 bp, synthetic construct
  source 1..50: mol_type = other DNA
cgccgaggaggccccgtccgtgggcgccaccggcaacggcatcgccggct

SEQ ID NO: 62717 - DNA, 50 bp, synthetic construct
  source 1..50: mol_type = other DNA
tgtccctatcacaccgtggagaaaggctattccgttcgctgggatcatca

SEQ ID NO: 62718 - DNA, 50 bp, synthetic construct
  source 1..50: mol_type = other DNA
ttaatcaacccggttcgatggaacgttcaatgataggttccacgtcaaaa

SEQ ID NO: 62719 - DNA, 50 bp, synthetic construct
  source 1..50: mol_type = other DNA
ctggggagggttcttgccagctactacatgctcgcaagacaacacgaaat

SEQ ID NO: 62720 - DNA, 50 bp, synthetic construct
  source 1..50: mol_type = other DNA
ttgataaaataggtacaagaaaacgtcttttcttgtatatctcagaccaa

SEQ ID NO: 62721 - DNA, 50 bp, synthetic construct
  source 1..50: mol_type = other DNA
caaaatttcctaaaaaatgataaaatttgtggactttttaggaacttttt

SEQ ID NO: 62722 - DNA, 50 bp, synthetic construct
  source 1..50: mol_type = other DNA
ataaaataggtacaagaaaagacatcagctgttacctgaaccttgtttat

SEQ ID NO: 62723 - DNA, 50 bp, synthetic construct
  source 1..50: mol_type = other DNA
tatcttttgcaattgatcattcgaaaaagaacattcttaatcaaaagaat

SEQ ID NO: 62724 - DNA, 50 bp, synthetic construct
  source 1..50: mol_type = other DNA
tacttatagcaacgattatgaaggatcattcactgctttgcctataagta

SEQ ID NO: 62725 - DNA, 50 bp, synthetic construct
  source 1..50: mol_type = other DNA
gttgaagaactacgctaaaagtattaataattttagcaattcatgaaaac

SEQ ID NO: 62726 - DNA, 50 bp, synthetic construct
  source 1..50: mol_type = other DNA
tgtgggttctgcaaatgatatatattgatttaacacttgcagaacctaca

SEQ ID NO: 62727 - DNA, 50 bp, synthetic construct
  source 1..50: mol_type = other DNA
aagatattttgcaccttaaaaacgaatgtttttggatctgcaaggaagcc

SEQ ID NO: 62728 - DNA, 50 bp, synthetic construct
  source 1..50: mol_type = other DNA
tggcggcaaaaagcctgctgcgggtgccagagcctttctttttgccgcag

SEQ ID NO: 62729 - DNA, 50 bp, synthetic construct
  source 1..50: mol_type = other DNA
gattctcatcgtgacgcacgatgaggggagcgttccattcgatgcgcttt

SEQ ID NO: 62730 - DNA, 50 bp, synthetic construct
  source 1..50: mol_type = other DNA
tcagtttgaactgggggaaaaggaaaccctgattccccagttcaaatctg

SEQ ID NO: 62731 - DNA, 50 bp, synthetic construct
  source 1..50: mol_type = other DNA
ttattagtttattatacgagaaatagctttcaggtatgataggctcatgt

SEQ ID NO: 62732 - DNA, 50 bp, synthetic construct
  source 1..50: mol_type = other DNA
cttgcgctccccaccttgtcgacgatcagctacaccgaattcagctacca

SEQ ID NO: 62733 - DNA, 50 bp, synthetic construct
  source 1..50: mol_type = other DNA
agcacctcgacggctgcgagctgtgcgcacgtaccaggcggtatgtcact

SEQ ID NO: 62734 - DNA, 50 bp, synthetic construct
  source 1..50: mol_type = other DNA
tacagtgcttatggatcagcttatgtaccagctcgtcttcgagcagtgtc

SEQ ID NO: 62735 - DNA, 50 bp, synthetic construct
  source 1..50: mol_type = other DNA
tcgtcggtgagcaccttgcggtcgagcaacgacaaggtggtcagtgacgc

SEQ ID NO: 62736 - DNA, 50 bp, synthetic construct
  source 1..50: mol_type = other DNA
tttttctaactcttctgccgcttcttaaaggaaggtgcgtaatagatgaa

SEQ ID NO: 62737 - DNA, 50 bp, synthetic construct
  source 1..50: mol_type = other DNA
taaagtaactactatgatattaactaatgagcatcgagcctttattattt

SEQ ID NO: 62738 - DNA, 50 bp, synthetic construct
  source 1..50: mol_type = other DNA
aatgtatttcttgattttttgggcagcctaatgatataaatccaatctta

SEQ ID NO: 62739 - DNA, 50 bp, synthetic construct
  source 1..50: mol_type = other DNA
ggggctatgaagcccctttttatgtcattaaaaataaaactcactgcccc

SEQ ID NO: 62740 - DNA, 50 bp, synthetic construct
  source 1..50: mol_type = other DNA
agtttggacaatagtgctaccgtctccacttgctcatcattgtccaaact

SEQ ID NO: 62741 - DNA, 50 bp, synthetic construct
  source 1..50: mol_type = other DNA
aataaatacaactatagcccatagtaatcgttgctataagtaggtttatt

SEQ ID NO: 62742 - DNA, 50 bp, synthetic construct
  source 1..50: mol_type = other DNA
atgcagtttttcttgtattacgttatagccaaatagaaagcgaggcgcaa

SEQ ID NO: 62743 - DNA, 50 bp, synthetic construct
  source 1..50: mol_type = other DNA
acgagaactggcagcgcgagcgcctcagcgctatggctcgaagaactcgt

SEQ ID NO: 62744 - DNA, 50 bp, synthetic construct
  source 1..50: mol_type = other DNA
tggttgtaaacgatactcgtggaatattccattaccaacttttacagtcc

SEQ ID NO: 62745 - DNA, 50 bp, synthetic construct
  source 1..50: mol_type = other DNA
gttgtcgtatgtgcggccttcacgttgtaccgtgccatacatgaaacaac

SEQ ID NO: 62746 - DNA, 50 bp, synthetic construct
  source 1..50: mol_type = other DNA
ccgggcggcgcggggaggcggatgttccagcgcagctttgcgcccgccaa

SEQ ID NO: 62747 - DNA, 50 bp, synthetic construct
  source 1..50: mol_type = other DNA
cccttgcattccttatatggcatggccatgccatatgatttcagcaattc

SEQ ID NO: 62748 - DNA, 50 bp, synthetic construct
  source 1..50: mol_type = other DNA
gtctggactatgttcttgtgggcgatctttctgttacaaatacagcagaa

SEQ ID NO: 62749 - DNA, 50 bp, synthetic construct
  source 1..50: mol_type = other DNA
tctgaaagatgcctgtggcttgccggattcgtgatttcaattctgtcatg

SEQ ID NO: 62750 - DNA, 50 bp, synthetic construct
  source 1..50: mol_type = other DNA
aaatatgacctattttccactctatcaagactggaaaccaatgtcgattt

SEQ ID NO: 62751 - DNA, 50 bp, synthetic construct
  source 1..50: mol_type = other DNA
agccggatgtatctcacaggtaaagataatgctgtgaaatacaccccggc

SEQ ID NO: 62752 - DNA, 50 bp, synthetic construct
  source 1..50: mol_type = other DNA
tattgtcgctcatggatcattatttaaccgtttagccccgattttctata

SEQ ID NO: 62753 - DNA, 50 bp, synthetic construct
  source 1..50: mol_type = other DNA
catgtaagtcatgcgcttttgcgtgtctgcggatgcggatgacgacggcg

SEQ ID NO: 62754 - DNA, 50 bp, synthetic construct
  source 1..50: mol_type = other DNA
gatcgccctgcgcaacggcggcgatgcgcaagcccttgcgcgtgcgcacg

SEQ ID NO: 62755 - DNA, 50 bp, synthetic construct
  source 1..50: mol_type = other DNA
aggaagctccgccagcttagcaaggccggatgccgctgccggactcgatg

SEQ ID NO: 62756 - DNA, 50 bp, synthetic construct
  source 1..50: mol_type = other DNA
taaaaatttaaaaatgagttataatattatagctccttttcaggagcttt

SEQ ID NO: 62757 - DNA, 50 bp, synthetic construct
  source 1..50: mol_type = other DNA
ataatttatattatagtctgcaaacaattgcaaacaatagacataaaatt

SEQ ID NO: 62758 - DNA, 50 bp, synthetic construct
  source 1..50: mol_type = other DNA
ataaaagaaaggttccattgagggaaccatcaatttactctttacaactt

SEQ ID NO: 62759 - DNA, 50 bp, synthetic construct
  source 1..50: mol_type = other DNA
ggtgtaattagatttaccccatttaatctgaggggaaatttaattataca

SEQ ID NO: 62760 - DNA, 50 bp, synthetic construct
  source 1..50: mol_type = other DNA
ttacataataaaataaatatttcaatttaaaaattaccagtatttgttaa

SEQ ID NO: 62761 - DNA, 50 bp, synthetic construct
  source 1..50: mol_type = other DNA
taatagttattataagctttaatgatgagagaaggttattttttttatac

SEQ ID NO: 62762 - DNA, 50 bp, synthetic construct
  source 1..50: mol_type = other DNA
tgttgtcaccttgttggtgtaattaggttgacgccaacatggtagcaaca

SEQ ID NO: 62763 - DNA, 50 bp, synthetic construct
  source 1..50: mol_type = other DNA
atttttcatttgcattgtctataattatataattaatcttaatcaaaaaa

SEQ ID NO: 62764 - DNA, 50 bp, synthetic construct
  source 1..50: mol_type = other DNA
ttgtagtaaaaataaaacttcacttttatgaaatttattttttactacac

SEQ ID NO: 62765 - DNA, 50 bp, synthetic construct
  source 1..50: mol_type = other DNA
tttagttcctcgtttcctctcgttggacggagaagaaacgagatgcaaaa

SEQ ID NO: 62766 - DNA, 50 bp, synthetic construct
  source 1..50: mol_type = other DNA
tgtcgtcaccttgttggtgtaattaggttgacacccacagggtgataaca

SEQ ID NO: 62767 - DNA, 50 bp, synthetic construct
  source 1..50: mol_type = other DNA
aaaaataacacaatatatttattgatataaatccaatcttagacattatt

SEQ ID NO: 62768 - DNA, 50 bp, synthetic construct
  source 1..50: mol_type = other DNA
gcaatttcttttgactttttcatatactatagcacggttgaaaaagtgat

SEQ ID NO: 62769 - DNA, 50 bp, synthetic construct
  source 1..50: mol_type = other DNA
ctggaacgctaaacagaagaatgccggaggattttatgttaagacagacc

SEQ ID NO: 62770 - DNA, 50 bp, synthetic construct
  source 1..50: mol_type = other DNA
gccagccgggtggagcgcgccatccggcaatcgagctttccccggaaggc

SEQ ID NO: 62771 - DNA, 50 bp, synthetic construct
  source 1..50: mol_type = other DNA
atctgtgacccagagccgattcggcgtcgagccggcaccggaggactgac

SEQ ID NO: 62772 - DNA, 50 bp, synthetic construct
  source 1..50: mol_type = other DNA
ttattttatataaaagctcaattatttattaaagaaaaaatataaaagat

SEQ ID NO: 62773 - DNA, 50 bp, synthetic construct
  source 1..50: mol_type = other DNA
aagggtgtgtttatctctgccgtgtgcataggtgcaattgacacatcctg

SEQ ID NO: 62774 - DNA, 50 bp, synthetic construct
  source 1..50: mol_type = other DNA
taaatatggtaatgataatatatgaatatatattatctatatgttgttac

SEQ ID NO: 62775 - DNA, 50 bp, synthetic construct
  source 1..50: mol_type = other DNA
tagttaaggatgtgtttaaatcataggtgcgattaacacatcctgaaact

SEQ ID NO: 62776 - DNA, 50 bp, synthetic construct
  source 1..50: mol_type = other DNA
cccttggaaagcaagacaaccgtctcaacggttgtttcagtttccaaggg

SEQ ID NO: 62777 - DNA, 50 bp, synthetic construct
  source 1..50: mol_type = other DNA
tgactcccgtttctgcccctaccgttgggagtgggcaatgacaatccgca

SEQ ID NO: 62778 - DNA, 50 bp, synthetic construct
  source 1..50: mol_type = other DNA
attttcaatagcaaggtataactttaaagttataccctgcttaaaataaa

SEQ ID NO: 62779 - DNA, 50 bp, synthetic construct
  source 1..50: mol_type = other DNA
caagttactattgaatggctctagtactacggcgattcgtagtatactat

SEQ ID NO: 62780 - DNA, 50 bp, synthetic construct
  source 1..50: mol_type = other DNA
gtatctttactaaaatcctgccatctttgcgggtgattttttcgttttat

SEQ ID NO: 62781 - DNA, 50 bp, synthetic construct
  source 1..50: mol_type = other DNA
aactctgtttttgatacaaagcaagctaaacttaaatccagttaaggcga

SEQ ID NO: 62782 - DNA, 50 bp, synthetic construct
  source 1..50: mol_type = other DNA
gaataaaagtaacaataactaacggaatatatttattacagctaatattt

SEQ ID NO: 62783 - DNA, 50 bp, synthetic construct
  source 1..50: mol_type = other DNA
gacttcgccaatgtcgcgtaccacattggataaacgaaagaaaggcacat

SEQ ID NO: 62784 - DNA, 50 bp, synthetic construct
  source 1..50: mol_type = other DNA
ttgtttgtataagcatatcacacttgagtgtgtaacgtttattacaacat

SEQ ID NO: 62785 - DNA, 50 bp, synthetic construct
  source 1..50: mol_type = other DNA
gcacttcggagtggaaataagtacgaccactactatacactccgcaacca

SEQ ID NO: 62786 - DNA, 50 bp, synthetic construct
  source 1..50: mol_type = other DNA
tggctgcaatcgtgcaccaccgagacctcaattgtcgagaaagtaagcca

SEQ ID NO: 62787 - DNA, 50 bp, synthetic construct
  source 1..50: mol_type = other DNA
cacaggggtgtaaagcacaacattcgattgatcgagtttcataccctcgt

SEQ ID NO: 62788 - DNA, 50 bp, synthetic construct
  source 1..50: mol_type = other DNA
aaaatttttttgcaaacactacacatgtgtagtatttgcaaagaaatgga

SEQ ID NO: 62789 - DNA, 50 bp, synthetic construct
  source 1..50: mol_type = other DNA
ctactacttgaaagcgattcacgcagtttcaaactcgcgacactgtcgtc

SEQ ID NO: 62790 - DNA, 50 bp, synthetic construct
  source 1..50: mol_type = other DNA
gctattgtactatgttgatccttcataaagagtaaacacgataaaagtta

SEQ ID NO: 62791 - DNA, 50 bp, synthetic construct
  source 1..50: mol_type = other DNA
tgaaacgccgctgttaagaggaggtcacttctattaactggtgctcattc

SEQ ID NO: 62792 - DNA, 50 bp, synthetic construct
  source 1..50: mol_type = other DNA
taactattaattttttgtttatcctaggataaacgcaaacctccttttta

SEQ ID NO: 62793 - DNA, 50 bp, synthetic construct
  source 1..50: mol_type = other DNA
taatgactttataattttgttgaactgcaggagaaattaataactcctga

SEQ ID NO: 62794 - DNA, 50 bp, synthetic construct
  source 1..50: mol_type = other DNA
atagatgcatactgattcattcatttcatcatgagtcagtatggtggccc

SEQ ID NO: 62795 - DNA, 50 bp, synthetic construct
  source 1..50: mol_type = other DNA
gaaaggagaaaaaatagcatgacagatgtcatactattttactgaaatgt

SEQ ID NO: 62796 - DNA, 50 bp, synthetic construct
  source 1..50: mol_type = other DNA
aaatcaaacaaaaacctctgaattattattagtgtattgattattgcagc

SEQ ID NO: 62797 - DNA, 50 bp, synthetic construct
  source 1..50: mol_type = other DNA
tttttgctaaaataaagaaatcatgatacatcaggaaatcttgcagaaaa

SEQ ID NO: 62798 - DNA, 50 bp, synthetic construct
  source 1..50: mol_type = other DNA
cataaatttggcgtcgctcaaaaggactttcgtcgcccgctctctttata

SEQ ID NO: 62799 - DNA, 50 bp, synthetic construct
  source 1..50: mol_type = other DNA
gggctcgatgcatctgaacaacgccggccttccacgagctcgacgagccc

SEQ ID NO: 62800 - DNA, 50 bp, synthetic construct
  source 1..50: mol_type = other DNA
caccacgtgatgcagggtttcgcgttaagagaaccttcggtcacctggga

SEQ ID NO: 62801 - DNA, 50 bp, synthetic construct
  source 1..50: mol_type = other DNA
ttattaaatttttttgtagctacaatttaagcgtaattaaaatttaataa

SEQ ID NO: 62802 - DNA, 50 bp, synthetic construct
  source 1..50: mol_type = other DNA
accttcctggcaggtataagtgtaataaagctaacatctgccaggaaata

SEQ ID NO: 62803 - DNA, 50 bp, synthetic construct
  source 1..50: mol_type = other DNA
cgcctcggcgcggggcacgaaatccgggccgcgtgaccgtggcgcgggcg

SEQ ID NO: 62804 - DNA, 50 bp, synthetic construct
  source 1..50: mol_type = other DNA
aggcggcgtaggtcgccgagaacagctgccggcggcgatcgccgccgcct

SEQ ID NO: 62805 - DNA, 50 bp, synthetic construct
  source 1..50: mol_type = other DNA
cacaggtaaatcatggacgtgttgatcaagtcaggcgtataatacccgta

SEQ ID NO: 62806 - DNA, 50 bp, synthetic construct
  source 1..50: mol_type = other DNA
gcttttctacgaataacctgcttcatgaacggcgctattcgtagaattct

SEQ ID NO: 62807 - DNA, 50 bp, synthetic construct
  source 1..50: mol_type = other DNA
cggtaatgctgatattggccttgttccgcaggccaatgagacgattacct

SEQ ID NO: 62808 - DNA, 50 bp, synthetic construct
  source 1..50: mol_type = other DNA
gatggcgacatataagcgtttatgctggtaaacgtacacatgtcgcagct

SEQ ID NO: 62809 - DNA, 50 bp, synthetic construct
  source 1..50: mol_type = other DNA
agaagaaaaatgaaaaattcattagcgcgaatgcttatatgtcgccatct

SEQ ID NO: 62810 - DNA, 50 bp, synthetic construct
  source 1..50: mol_type = other DNA
aaggatacacaataaagtttaccgttcggtaaattttttaatatccataa

SEQ ID NO: 62811 - DNA, 50 bp, synthetic construct
  source 1..50: mol_type = other DNA
atttttagaataattttagacataattgatgctaataaaaaacgtacttg

SEQ ID NO: 62812 - DNA, 50 bp, synthetic construct
  source 1..50: mol_type = other DNA
aaaatttttttgcaaacactacacatgtgtagtttttgcaaaaaaattga

SEQ ID NO: 62813 - DNA, 50 bp, synthetic construct
  source 1..50: mol_type = other DNA
ttattatacatattttcttcctcctaggagcaagaaaaaagcattaaaaa

SEQ ID NO: 62814 - DNA, 50 bp, synthetic construct
  source 1..50: mol_type = other DNA
caaagagggaactaaacacttaattgtttatagttcatgttcactcctcc

SEQ ID NO: 62815 - DNA, 50 bp, synthetic construct
  source 1..50: mol_type = other DNA
gctagactactttagttactatcatatctacctacttttcgtatattaga

SEQ ID NO: 62816 - DNA, 50 bp, synthetic construct
  source 1..50: mol_type = other DNA
ccttcataatagtcattatataaaatttattatattggtggaagtgaagc

SEQ ID NO: 62817 - DNA, 50 bp, synthetic construct
  source 1..50: mol_type = other DNA
aattaggttgactccattaagccctaggaataaatggattggaattacta

SEQ ID NO: 62818 - DNA, 50 bp, synthetic construct
  source 1..50: mol_type = other DNA
tacaaaaaaagatgaccaaaatggccattaattggagctttttcttttta

SEQ ID NO: 62819 - DNA, 50 bp, synthetic construct
  source 1..50: mol_type = other DNA
ttttgtatctcgtttcttcttcttccaacgagagaaaacgaggtactaaa

SEQ ID NO: 62820 - DNA, 50 bp, synthetic construct
  source 1..50: mol_type = other DNA
tttttttgggtaaaaagaaaagcctagttccctctttgcgtccaacgaga

SEQ ID NO: 62821 - DNA, 50 bp, synthetic construct
  source 1..50: mol_type = other DNA
tttatcctgaaaagagacttcacagatatgaagttgctagcgacatacat

SEQ ID NO: 62822 - DNA, 50 bp, synthetic construct
  source 1..50: mol_type = other DNA
gctttagctacggcttttgcggcttcaaatacaaaaggggtacatccgta

SEQ ID NO: 62823 - DNA, 50 bp, synthetic construct
  source 1..50: mol_type = other DNA
tctagtttctgcaatgagggcatggaaatggtgcagggcttgaaaatcgg

SEQ ID NO: 62824 - DNA, 50 bp, synthetic construct
  source 1..50: mol_type = other DNA
caggaagtggttgccgctgtaaaagaatttatagaggcaataactttagg

SEQ ID NO: 62825 - DNA, 50 bp, synthetic construct
  source 1..50: mol_type = other DNA
gcctccggctgaaaattaaaaagccgcctttcgcacattaaccatgaggc

SEQ ID NO: 62826 - DNA, 50 bp, synthetic construct
  source 1..50: mol_type = other DNA
tcgaggggtgaaatcctcaacacgcggtcgtcgtgttttgcacccctgac

SEQ ID NO: 62827 - DNA, 50 bp, synthetic construct
  source 1..50: mol_type = other DNA
gggtatgaaactcgatcaattgcgtattcgattgttgtgctttacacccg

SEQ ID NO: 62828 - DNA, 50 bp, synthetic construct
  source 1..50: mol_type = other DNA
taccgatccgcgcatggtgctctatatacagcaccatgaaagcagcgatc

SEQ ID NO: 62829 - DNA, 50 bp, synthetic construct
  source 1..50: mol_type = other DNA
gtttgtagaaccgagtcgatccggtggcgcatcgacgcggtttacacaac

SEQ ID NO: 62830 - DNA, 50 bp, synthetic construct
  source 1..50: mol_type = other DNA
agttgatccctcataaacttagtccaggcaaagtttataaaaagtaaaca

SEQ ID NO: 62831 - DNA, 50 bp, synthetic construct
  source 1..50: mol_type = other DNA
gaccatagattccgttttctgagacgtctcagaaaacggaatctatggtc

SEQ ID NO: 62832 - DNA, 50 bp, synthetic construct
  source 1..50: mol_type = other DNA
cctttgctattaagtaacaatatcacaatgtagttacatatgtaaaaaat

SEQ ID NO: 62833 - DNA, 50 bp, synthetic construct
  source 1..50: mol_type = other DNA
cctttgctattaagtaacaatatcacaatgttgtttcatatgtaaaatta

SEQ ID NO: 62834 - DNA, 50 bp, synthetic construct
  source 1..50: mol_type = other DNA
ctgctgatactgctgccaaaaactgcaccctttaacactacactcatcat

SEQ ID NO: 62835 - DNA, 50 bp, synthetic construct
  source 1..50: mol_type = other DNA
ttaaagcaggaaggtaaatattactggcaagatttaccttactagtaaat

SEQ ID NO: 62836 - DNA, 50 bp, synthetic construct
  source 1..50: mol_type = other DNA
tcagtaaatttaatatacttcatttcaatgaaagatacctaatatactta

SEQ ID NO: 62837 - DNA, 50 bp, synthetic construct
  source 1..50: mol_type = other DNA
tttaaattgctatatttaaatcaaaaagaatttcaattgaatgtattaag

SEQ ID NO: 62838 - DNA, 50 bp, synthetic construct
  source 1..50: mol_type = other DNA
aaaccccgtaaaactcgatacagagcgctggcaatgggttttggctttac

SEQ ID NO: 62839 - DNA, 50 bp, synthetic construct
  source 1..50: mol_type = other DNA
agaaagcgcatgagtatatagttgttgaattgtatatttgaatattttat

SEQ ID NO: 62840 - DNA, 50 bp, synthetic construct
  source 1..50: mol_type = other DNA
cgccgccctgaccttcggcctggtgggacgcgggaatggtcacgtccgag

SEQ ID NO: 62841 - DNA, 50 bp, synthetic construct
  source 1..50: mol_type = other DNA
agccgtaatgccggcggctcgtgcgggccgccgccggcgtggcaacggag

SEQ ID NO: 62842 - DNA, 50 bp, synthetic construct
  source 1..50: mol_type = other DNA
tgtctcctctttaataacctttttataaaaaggtcattaaaaaacaaaaa

SEQ ID NO: 62843 - DNA, 50 bp, synthetic construct
  source 1..50: mol_type = other DNA
ttctgcttctcaatattaaagtaaaattaatttagtatcggaggatatat

SEQ ID NO: 62844 - DNA, 50 bp, synthetic construct
  source 1..50: mol_type = other DNA
cattggggtctaatggtgtctcaatttttagcaaccattagaccccaaaa

SEQ ID NO: 62845 - DNA, 50 bp, synthetic construct
  source 1..50: mol_type = other DNA
acaactatttatttccagattcccaagctccgcgtcaaaagtgcacttaa

SEQ ID NO: 62846 - DNA, 50 bp, synthetic construct
  source 1..50: mol_type = other DNA
ccatccccagccatatagttggaagccgcaaaacgggagggcgcggatca

SEQ ID NO: 62847 - DNA, 50 bp, synthetic construct
  source 1..50: mol_type = other DNA
attcccatacggcctttacgcttggcataaaatcaattctaagccttcca

SEQ ID NO: 62848 - DNA, 50 bp, synthetic construct
  source 1..50: mol_type = other DNA
cagcgccactgccggaagagaatttcgttactcttccaagagtggcgtaa

SEQ ID NO: 62849 - DNA, 50 bp, synthetic construct
  source 1..50: mol_type = other DNA
ttagtagtgtatcaccagctttaacacaaaaaatactaaatctctactac

SEQ ID NO: 62850 - DNA, 50 bp, synthetic construct
  source 1..50: mol_type = other DNA
cgatttcactctttgtatcaacgctaggataggaacacaaattattaacc

SEQ ID NO: 62851 - DNA, 50 bp, synthetic construct
  source 1..50: mol_type = other DNA
gccttttccctaaaaaacctcatttaaatgaggttttttcccactttaca

SEQ ID NO: 62852 - DNA, 50 bp, synthetic construct
  source 1..50: mol_type = other DNA
cttgttattaataatctacagacagctgtgcgttgctaataaaaaaatag

SEQ ID NO: 62853 - DNA, 50 bp, synthetic construct
  source 1..50: mol_type = other DNA
taacacaatatccaccgagtaaaaatttttattggctcaatttcttcttc

SEQ ID NO: 62854 - DNA, 50 bp, synthetic construct
  source 1..50: mol_type = other DNA
tgggtacatccctgccaacnaaaccagtacaatcgtacatcatctaccct

SEQ ID NO: 62855 - DNA, 50 bp, synthetic construct
  source 1..50: mol_type = other DNA
aagtcaataaagtctattttagggttcaccgtaataagtaagtgcggttt

SEQ ID NO: 62856 - DNA, 50 bp, synthetic construct
  source 1..50: mol_type = other DNA
cccgtgtcacgcccctgcaagcattggcttgtgcagctgcgtgactcgaa

SEQ ID NO: 62857 - DNA, 50 bp, synthetic construct
  source 1..50: mol_type = other DNA
tagtcagattgatttatttttgatgatgtgaaaatagtaaccgcagatgg

SEQ ID NO: 62858 - DNA, 50 bp, synthetic construct
  source 1..50: mol_type = other DNA
aatatactatataatcatacgttctctaattagctttgataaaacatatg

SEQ ID NO: 62859 - DNA, 50 bp, synthetic construct
  source 1..50: mol_type = other DNA
attgaatggatttagcggcttgttttttcacaatactcaatccaatcagc

SEQ ID NO: 62860 - DNA, 50 bp, synthetic construct
  source 1..50: mol_type = other DNA
aattcgtacacacctcatcctcttacacatccacgcgcccccattctctt

SEQ ID NO: 62861 - DNA, 50 bp, synthetic construct
  source 1..50: mol_type = other DNA
agaagtgattaaaagaacatcaaacgtttaatacttcaccgactatgccc

SEQ ID NO: 62862 - DNA, 50 bp, synthetic construct
  source 1..50: mol_type = other DNA
gtaggtgcatatgcttacaacctgcttagattgtgtaataatgcaccaaa

SEQ ID NO: 62863 - DNA, 50 bp, synthetic construct
  source 1..50: mol_type = other DNA
gcatcacgcggcggcgaattgtggatccacaatttggagtttaaagatta

SEQ ID NO: 62864 - DNA, 50 bp, synthetic construct
  source 1..50: mol_type = other DNA
acttccttttcctgtatccgtgagtattatataataaagtaaaaataaac

SEQ ID NO: 62865 - DNA, 50 bp, synthetic construct
  source 1..50: mol_type = other DNA
attaatttttggcaatgcgtgctaattatcatgtgatgtaaaatataggg

SEQ ID NO: 62866 - DNA, 50 bp, synthetic construct
  source 1..50: mol_type = other DNA
tgctttactataaccaactcttcattggttggcaagctattagtacagca

SEQ ID NO: 62867 - DNA, 50 bp, synthetic construct
  source 1..50: mol_type = other DNA
gtaggtgcaatactaatagattgccagcaatcagtggcactgctgaataa

SEQ ID NO: 62868 - DNA, 50 bp, synthetic construct
  source 1..50: mol_type = other DNA
gatttatcgaaattagacaacttttatcaagaaggttatttatgactcat

SEQ ID NO: 62869 - DNA, 50 bp, synthetic construct
  source 1..50: mol_type = other DNA
aaaattggaattctctttcctctgcgcgcgctcggcaagtctccggggga

SEQ ID NO: 62870 - DNA, 50 bp, synthetic construct
  source 1..50: mol_type = other DNA
catagctgttttggcataggcgccatggccccatagctcagttggttaga

SEQ ID NO: 62871 - DNA, 50 bp, synthetic construct
  source 1..50: mol_type = other DNA
tcttattttttattataggcaacaatgctatgtcaaaagaaaaaataaaa

SEQ ID NO: 62872 - DNA, 50 bp, synthetic construct
  source 1..50: mol_type = other DNA
gctagaccaggtacgtaccgtttttggagacgcgagcatacccagctacg

SEQ ID NO: 62873 - DNA, 50 bp, synthetic construct
  source 1..50: mol_type = other DNA
taatcttttacagtacaattggatttttcaaattgatatatcgcctttta

SEQ ID NO: 62874 - DNA, 50 bp, synthetic construct
  source 1..50: mol_type = other DNA
agccgtgatggccgagacgagcaggggtgctcgtcacgttcgtgactgtg

SEQ ID NO: 62875 - DNA, 50 bp, synthetic construct
  source 1..50: mol_type = other DNA
taggtagattgcggttttcatagatatctcttttaaacgagatacggtta

SEQ ID NO: 62876 - DNA, 50 bp, synthetic construct
  source 1..50: mol_type = other DNA
aagcttcctatgaaggaagccctaagaaaacgtttcttccaaggaaagac

SEQ ID NO: 62877 - DNA, 50 bp, synthetic construct
  source 1..50: mol_type = other DNA
tttatcaggttttagtatttcgctaacactaaacgggaaaaccttgtaaa

SEQ ID NO: 62878 - DNA, 50 bp, synthetic construct
  source 1..50: mol_type = other DNA
agcaatgcccgcaaatactataatgaatcatagtattttgtacattttta

SEQ ID NO: 62879 - DNA, 50 bp, synthetic construct
  source 1..50: mol_type = other DNA
ttcttgctgtgaggggataatatcatactataacccacttaataggagat

SEQ ID NO: 62880 - DNA, 50 bp, synthetic construct
  source 1..50: mol_type = other DNA
tttgttttttctttgttcaacgtaaatacgaaaagtcaataaaaaacact

SEQ ID NO: 62881 - DNA, 50 bp, synthetic construct
  source 1..50: mol_type = other DNA
tttgtaaaagtgatagcaattacacctttaagtcggtgaacttttaactt

SEQ ID NO: 62882 - DNA, 50 bp, synthetic construct
  source 1..50: mol_type = other DNA
aatttgcaatactgttggtaataaagttattaccaatactatgacatttt

SEQ ID NO: 62883 - DNA, 50 bp, synthetic construct
  source 1..50: mol_type = other DNA
ctattgttttgatatctattttatgtatggtgtaactatgagaaaagtat

SEQ ID NO: 62884 - DNA, 50 bp, synthetic construct
  source 1..50: mol_type = other DNA
atacgaaaacaatcgaacttagcaaggtctaatttcatttcatgatctac

SEQ ID NO: 62885 - DNA, 50 bp, synthetic construct
  source 1..50: mol_type = other DNA
taaacttttttcattgttacaccatatttaaaaacaatctaaaaataaac

SEQ ID NO: 62886 - DNA, 50 bp, synthetic construct
  source 1..50: mol_type = other DNA
tgctgaggtagtacattgcaatgaacagattatgatgcacttcataattt

SEQ ID NO: 62887 - DNA, 50 bp, synthetic construct
  source 1..50: mol_type = other DNA
ctcaatataatttttctatatcatatagcatttaataaaattttattaaa

SEQ ID NO: 62888 - DNA, 50 bp, synthetic construct
  source 1..50: mol_type = other DNA
cagctaatttatgtacattttacgtagaggaaaagaggggaaatttcctc

SEQ ID NO: 62889 - DNA, 50 bp, synthetic construct
  source 1..50: mol_type = other DNA
atcgacatcgagtttggacaataatgcgggagtcaaaaggtccagtggac

SEQ ID NO: 62890 - DNA, 50 bp, synthetic construct
  source 1..50: mol_type = other DNA
cttaaaggagcaaagactagtactttactagattgaattagacctttctt

SEQ ID NO: 62891 - DNA, 50 bp, synthetic construct
  source 1..50: mol_type = other DNA
tacagcgattgctaaaacatcatctaatatgagttttggatatcgcttat

SEQ ID NO: 62892 - DNA, 50 bp, synthetic construct
  source 1..50: mol_type = other DNA
gagagtctgtcattgcatttgcaaatttgattcatttatgacatctgctt

SEQ ID NO: 62893 - DNA, 50 bp, synthetic construct
  source 1..50: mol_type = other DNA
attatacttatatttaattagttgtattgataatagttattatacataaa

SEQ ID NO: 62894 - DNA, 50 bp, synthetic construct
  source 1..50: mol_type = other DNA
cctgcattatttatcaccttttttatgaataatcaattaaaaagatggat

SEQ ID NO: 62895 - DNA, 50 bp, synthetic construct
  source 1..50: mol_type = other DNA
gttggtttcaaaggcatcgccaaaaaggtgacgacaaagcataaacgctt

SEQ ID NO: 62896 - DNA, 50 bp, synthetic construct
  source 1..50: mol_type = other DNA
ttaaatttggttacatccctgctaaccgttcatcatctacccttttttcg

SEQ ID NO: 62897 - DNA, 50 bp, synthetic construct
  source 1..50: mol_type = other DNA
aaacagtgttttgttaataatatgtacaaaaaggcgctaaaccctttaaa

SEQ ID NO: 62898 - DNA, 50 bp, synthetic construct
  source 1..50: mol_type = other DNA
aaacatgaagattatgatctggtagatagtagagtatagctttcatctac

SEQ ID NO: 62899 - DNA, 50 bp, synthetic construct
  source 1..50: mol_type = other DNA
atccatgaattacacgcattttttgaaaaaaatcagagtagccgcttatt

SEQ ID NO: 62900 - DNA, 50 bp, synthetic construct
  source 1..50: mol_type = other DNA
tgagatggaaaaaagaaataattttaaaattacttatattttccacttga

SEQ ID NO: 62901 - DNA, 50 bp, synthetic construct
  source 1..50: mol_type = other DNA
ccatctttagttagaatacatctaatataatcctttctaatataatatag

SEQ ID NO: 62902 - DNA, 50 bp, synthetic construct
  source 1..50: mol_type = other DNA
taatattacactaaatattagtaaaattaagaaggtgattatatggcaat

SEQ ID NO: 62903 - DNA, 50 bp, synthetic construct
  source 1..50: mol_type = other DNA
cagaaactcaaggtcaagtcgctggtcagcgacacggaacgcttgctcga

SEQ ID NO: 62904 - DNA, 50 bp, synthetic construct
  source 1..50: mol_type = other DNA
ccagctcagcttccctttctcctgatacatagaaatggaagcagataaag

SEQ ID NO: 62905 - DNA, 50 bp, synthetic construct
  source 1..50: mol_type = other DNA
aaattaattagcccatatattgacatggagatgttgtggctaattaattt

SEQ ID NO: 62906 - DNA, 50 bp, synthetic construct
  source 1..50: mol_type = other DNA
aagacttgacaaaatcgaacaaatatttttatgaacttttttcgatgctt

SEQ ID NO: 62907 - DNA, 50 bp, synthetic construct
  source 1..50: mol_type = other DNA
tggaccacatcaaggtttttgaagatcttcaataatcaataattgttcca

SEQ ID NO: 62908 - DNA, 50 bp, synthetic construct
  source 1..50: mol_type = other DNA
cataaaatataataaccacactttttccccgctggctgttatttttatac

SEQ ID NO: 62909 - DNA, 50 bp, synthetic construct
  source 1..50: mol_type = other DNA
tgaattaggtgcatctactgcaaaggagtcgagttaatgccctgaattgc

SEQ ID NO: 62910 - DNA, 50 bp, synthetic construct
  source 1..50: mol_type = other DNA
aactgaaagcaattacagaactggacccaagctgaatatgcctacagttt

SEQ ID NO: 62911 - DNA, 50 bp, synthetic construct
  source 1..50: mol_type = other DNA
aattcttgtgccgctgtttctaccaggggcgatagagcggaaatgtcaga

SEQ ID NO: 62912 - DNA, 50 bp, synthetic construct
  source 1..50: mol_type = other DNA
cgcggtaaatccagaaccgtctgatttctacatattcttcctttgtagca

SEQ ID NO: 62913 - DNA, 50 bp, synthetic construct
  source 1..50: mol_type = other DNA
atttacgtgcccattggattattccgggtgatctacacggaaacctttac

SEQ ID NO: 62914 - DNA, 50 bp, synthetic construct
  source 1..50: mol_type = other DNA
atctgcgatacctttcacctttctttgcaaattcccgacgagtcatagaa

SEQ ID NO: 62915 - DNA, 50 bp, synthetic construct
  source 1..50: mol_type = other DNA
gctgatagaattacagaagaaaaaagtttcccttagttaaagatatgaac

SEQ ID NO: 62916 - DNA, 50 bp, synthetic construct
  source 1..50: mol_type = other DNA
ttaaaagaggtgctgtaagttatattgacaagggcacacagccctttgtc

SEQ ID NO: 62917 - DNA, 50 bp, synthetic construct
  source 1..50: mol_type = other DNA
tggtatctttaactatgggaatgccccgtttcccttaattaaagatattg

SEQ ID NO: 62918 - DNA, 50 bp, synthetic construct
  source 1..50: mol_type = other DNA
tctgacgagaaaagcccggtaaatcaatatatcatacaaaatgcgtcaga

SEQ ID NO: 62919 - DNA, 50 bp, synthetic construct
  source 1..50: mol_type = other DNA
ctcttaaagcttagttcttgtttttaaaaataaggactgcactcggagaa

SEQ ID NO: 62920 - DNA, 50 bp, synthetic construct
  source 1..50: mol_type = other DNA
actaagggaattagttctaaactcatgacttactaaccaatgcccctatc

SEQ ID NO: 62921 - DNA, 50 bp, synthetic construct
  source 1..50: mol_type = other DNA
cattcttcatatggattatcaggataattttatgatagaggtgaggtatg

SEQ ID NO: 62922 - DNA, 50 bp, synthetic construct
  source 1..50: mol_type = other DNA
aagataaaggagctgtttggggcttaaaccactgtgggaattattctcca

SEQ ID NO: 62923 - DNA, 50 bp, synthetic construct
  source 1..50: mol_type = other DNA
ttgtcattgatgtatgtgttgttattttaagtttcatgcttcaatgccag

SEQ ID NO: 62924 - DNA, 50 bp, synthetic construct
  source 1..50: mol_type = other DNA
gtgctttaatatactctccaaacgattcattgaatttcataaacttcgct

SEQ ID NO: 62925 - DNA, 50 bp, synthetic construct
  source 1..50: mol_type = other DNA
aatgtgccgaaaatcggctggtatttccaccagcaccttaagttcttctt

SEQ ID NO: 62926 - DNA, 50 bp, synthetic construct
  source 1..50: mol_type = other DNA
ctcacactttgtctgggcgtcccatattcaaggagatgatattatgttag

SEQ ID NO: 62927 - DNA, 50 bp, synthetic construct
  source 1..50: mol_type = other DNA
tttcgctggcgaaggtaaaagtaattttactgttatgatctttgggaaaa

SEQ ID NO: 62928 - DNA, 50 bp, synthetic construct
  source 1..50: mol_type = other DNA
gatccagcttaacaacgccaaagccggctttgtttttgtcaagagatgca

SEQ ID NO: 62929 - DNA, 50 bp, synthetic construct
  source 1..50: mol_type = other DNA
cctataccgatgagcacttcaaccgattatgccaggaaatcgttgatatt

SEQ ID NO: 62930 - DNA, 50 bp, synthetic construct
  source 1..50: mol_type = other DNA
atcgcccctgaccgaggccggacgcattgggtgccgcggtcccaaacgat

SEQ ID NO: 62931 - DNA, 50 bp, synthetic construct
  source 1..50: mol_type = other DNA
tagcgcctgtggcgtgatgtagttgagacgaaatccagcgaccagcgctg

SEQ ID NO: 62932 - DNA, 50 bp, synthetic construct
  source 1..50: mol_type = other DNA
cgatgaacaggatgacctcgccgttcacggcgacgttggcatggtaggtt

SEQ ID NO: 62933 - DNA, 50 bp, synthetic construct
  source 1..50: mol_type = other DNA
gaagcaccttagcaatacgaagcccagccttcgtattgttaaggtgcttt

SEQ ID NO: 62934 - DNA, 50 bp, synthetic construct
  source 1..50: mol_type = other DNA
gattttgtatgaagcaccttagcaattgttaaggtgctttaatcactcct

SEQ ID NO: 62935 - DNA, 50 bp, synthetic construct
  source 1..50: mol_type = other DNA
caaaaacaaaaaaataatttacacgagcttaattttatttttaattatct

SEQ ID NO: 62936 - DNA, 50 bp, synthetic construct
  source 1..50: mol_type = other DNA
aaaaggaaataggataaagaagtaaatactttttggttgttttaatcgtg

SEQ ID NO: 62937 - DNA, 50 bp, synthetic construct
  source 1..50: mol_type = other DNA
acaacattgatgtcgtgttttaagttgcctaatcatatctaaaatgttac

SEQ ID NO: 62938 - DNA, 50 bp, synthetic construct
  source 1..50: mol_type = other DNA
ctagttgtcctgatagtaaagctatttaacttttggattatagtaaagtc

SEQ ID NO: 62939 - DNA, 50 bp, synthetic construct
  source 1..50: mol_type = other DNA
gccgtcaaaggcgaggagcccgaggtcttcacctcctctactctagttag

SEQ ID NO: 62940 - DNA, 50 bp, synthetic construct
  source 1..50: mol_type = other DNA
ccactccagaactatcactctggagctcgtaagtaggtgttctggagcct

SEQ ID NO: 62941 - DNA, 50 bp, synthetic construct
  source 1..50: mol_type = other DNA
cagcagtgcgcgaacgctctgttgcttcaaaaaccgatagcgcgccagcg

SEQ ID NO: 62942 - DNA, 50 bp, synthetic construct
  source 1..50: mol_type = other DNA
ccattttgtgtattttgagttattaaaatgactccctatacaagaaatag

SEQ ID NO: 62943 - DNA, 50 bp, synthetic construct
  source 1..50: mol_type = other DNA
aaaatatgcttgggtacatgatgaagcggggatgtaaccaaatttaagta

SEQ ID NO: 62944 - DNA, 50 bp, synthetic construct
  source 1..50: mol_type = other DNA
cttggtttaccgttagatatatcacgtatcataaataacggtaaactttt

SEQ ID NO: 62945 - DNA, 50 bp, synthetic construct
  source 1..50: mol_type = other DNA
taaatgtgaccatttgtatgttgaattgaaaatacaccagaacactttac

SEQ ID NO: 62946 - DNA, 50 bp, synthetic construct
  source 1..50: mol_type = other DNA
gatatttcctacttctttctcaatattagtaataaggagggctaactatg

SEQ ID NO: 62947 - DNA, 50 bp, synthetic construct
  source 1..50: mol_type = other DNA
aagttattcaaatgaatgaagctgcatcaattcattttatataatgaata

SEQ ID NO: 62948 - DNA, 50 bp, synthetic construct
  source 1..50: mol_type = other DNA
tatcaaacttccgctttactatcactaactagtaaagcgttatcttgacc

SEQ ID NO: 62949 - DNA, 50 bp, synthetic construct
  source 1..50: mol_type = other DNA
tcataacgctaattgacatatagttgccgaacttataattagagttatcg

SEQ ID NO: 62950 - DNA, 50 bp, synthetic construct
  source 1..50: mol_type = other DNA
gatgattggttaccgtgcggtcgcttggagcggcgacttaaaccatctaa

SEQ ID NO: 62951 - DNA, 50 bp, synthetic construct
  source 1..50: mol_type = other DNA
attactttcatagaacttcctccttaaatagcacattcaaataaagtata

SEQ ID NO: 62952 - DNA, 50 bp, synthetic construct
  source 1..50: mol_type = other DNA
cacattaaaactaaacagcttcagttttcgcaatgcgtggttttaatatt

SEQ ID NO: 62953 - DNA, 50 bp, synthetic construct
  source 1..50: mol_type = other DNA
cttgattggtcacctaaaaagaaaaataattttttagaagaagtataaag

SEQ ID NO: 62954 - DNA, 50 bp, synthetic construct
  source 1..50: mol_type = other DNA
atattacgttttaaggggaatgatgcaatattaacctttttaataaatgc

SEQ ID NO: 62955 - DNA, 50 bp, synthetic construct
  source 1..50: mol_type = other DNA
agattccagaagaaatttaatatttaaaaaacaatttccttcgggagagt

SEQ ID NO: 62956 - DNA, 50 bp, synthetic construct
  source 1..50: mol_type = other DNA
cacagacacgaaaaaacacgaaacggattttgagtttttgtcctcatctt

SEQ ID NO: 62957 - DNA, 50 bp, synthetic construct
  source 1..50: mol_type = other DNA
tctttcttccaaactagaccaatcccgaacggtcaaatatagactaaaat

SEQ ID NO: 62958 - DNA, 50 bp, synthetic construct
  source 1..50: mol_type = other DNA
aaatcacctaactctcccgaaggaaattcttcgggattcatcaaatttta

SEQ ID NO: 62959 - DNA, 50 bp, synthetic construct
  source 1..50: mol_type = other DNA
aactgtggtatacatgctaacagcgtgctgttccaatgtaaacaactgta

SEQ ID NO: 62960 - DNA, 50 bp, synthetic construct
  source 1..50: mol_type = other DNA
ttacgagcgattgtatagtttttcgaaaaaatcaccaacatccacgttaa

SEQ ID NO: 62961 - DNA, 50 bp, synthetic construct
  source 1..50: mol_type = other DNA
cttcaatgtttttataaacagaaaaattagcaaggatgtaaccaaattta

SEQ ID NO: 62962 - DNA, 50 bp, synthetic construct
  source 1..50: mol_type = other DNA
cttgccgcccagggggtcggccagggctggaagcggaccagggcgagccg

SEQ ID NO: 62963 - DNA, 50 bp, synthetic construct
  source 1..50: mol_type = other DNA
acgtctacagcgcgtgtggatctggcccaagaaccacacggactgtacac

SEQ ID NO: 62964 - DNA, 50 bp, synthetic construct
  source 1..50: mol_type = other DNA
agcgaaagtaatgacatgtttgatttttcaatcacctaaaactcgtacat

SEQ ID NO: 62965 - DNA, 50 bp, synthetic construct
  source 1..50: mol_type = other DNA
tgtcgtcaccatgttggcgtcaacctaattacaccaacaaggtgacgaca

SEQ ID NO: 62966 - DNA, 50 bp, synthetic construct
  source 1..50: mol_type = other DNA
ttctcacggtgataaactcccatgcaggcatgaaattacgcagatggttt

SEQ ID NO: 62967 - DNA, 50 bp, synthetic construct
  source 1..50: mol_type = other DNA
actttattataatacagcacttcaggtttgactgtgggttatagcaaaag

SEQ ID NO: 62968 - DNA, 50 bp, synthetic construct
  source 1..50: mol_type = other DNA
ctgtaaattatgttagggtgattgaaaaaagaatatggattaatctacag

SEQ ID NO: 62969 - DNA, 50 bp, synthetic construct
  source 1..50: mol_type = other DNA
aaaaaaatatttttaatattaggaatattttttattaaccttgtttttta

SEQ ID NO: 62970 - DNA, 50 bp, synthetic construct
  source 1..50: mol_type = other DNA
atgtgggaatgaaggcggaccttcatcaaattccatcgtaattcccccat

SEQ ID NO: 62971 - DNA, 50 bp, synthetic construct
  source 1..50: mol_type = other DNA
gaaaacccgcacgcatatccaatatctaggggttaggacgccaggttttc

SEQ ID NO: 62972 - DNA, 50 bp, synthetic construct
  source 1..50: mol_type = other DNA
aggatgacgaggcccgcgtcaggagcgcttgacgcctcccggcacatccc

SEQ ID NO: 62973 - DNA, 50 bp, synthetic construct
  source 1..50: mol_type = other DNA
aactattggatatgatgaagttgtaaacaaataaatcatgctcatagagg

SEQ ID NO: 62974 - DNA, 50 bp, synthetic construct
  source 1..50: mol_type = other DNA
ttttgtatcccatttcctctccctccaacgagagaaaacgaggtactaaa

SEQ ID NO: 62975 - DNA, 50 bp, synthetic construct
  source 1..50: mol_type = other DNA
tttagttcctcgttttctctcgttggaagaagaagaaacgagatacaaaa

SEQ ID NO: 62976 - DNA, 50 bp, synthetic construct
  source 1..50: mol_type = other DNA
catccccacctggtgggcctttgaggtcgtcccccgatccggtggcgtcc

SEQ ID NO: 62977 - DNA, 50 bp, synthetic construct
  source 1..50: mol_type = other DNA
atctggtcgaattgcggggtggtgcccacctgggtgaagctcgacctaag

SEQ ID NO: 62978 - DNA, 50 bp, synthetic construct
  source 1..50: mol_type = other DNA
tcgttcgacaaatttcagaataaaattttatcctgagccttgtcccaaat

SEQ ID NO: 62979 - DNA, 50 bp, synthetic construct
  source 1..50: mol_type = other DNA
cttgtctttgatcccgatgacaaatcgatctggtcatcatcgatgagatc

SEQ ID NO: 62980 - DNA, 50 bp, synthetic construct
  source 1..50: mol_type = other DNA
gcgagtgaagactggatgtagagtgcggccttcttcgcgtcttcgtagaa

SEQ ID NO: 62981 - DNA, 50 bp, synthetic construct
  source 1..50: mol_type = other DNA
gtggaacgtatagcgtagcatgtctggacgtgttcaatgataggttccac

SEQ ID NO: 62982 - DNA, 50 bp, synthetic construct
  source 1..50: mol_type = other DNA
agcgttactgttagcattggtgacgtatcaagatttctaggcgttgtcct

SEQ ID NO: 62983 - DNA, 50 bp, synthetic construct
  source 1..50: mol_type = other DNA
tcatttcctttatcgtactctattgggataatgtattatagtggaaattt

SEQ ID NO: 62984 - DNA, 50 bp, synthetic construct
  source 1..50: mol_type = other DNA
aaccttagaaatattatataaattagaatttaccagaactttctattctc

SEQ ID NO: 62985 - DNA, 50 bp, synthetic construct
  source 1..50: mol_type = other DNA
ggatttgatgaattttacccccacatgtaaccatttaatacatttgtata

SEQ ID NO: 62986 - DNA, 50 bp, synthetic construct
  source 1..50: mol_type = other DNA
cgaggccaaagaacaggctttcgttgccgaaagttgcatccggcaaattc

SEQ ID NO: 62987 - DNA, 50 bp, synthetic construct
  source 1..50: mol_type = other DNA
caaatcatcgacaaaagtgtttgaaggtcacaagaccgacatttgaagtt

SEQ ID NO: 62988 - DNA, 50 bp, synthetic construct
  source 1..50: mol_type = other DNA
aagccgagggtctggccgaaatcctctgatatctaccgtactaggcttta

SEQ ID NO: 62989 - DNA, 50 bp, synthetic construct
  source 1..50: mol_type = other DNA
aaaaccagctcaccggacgctcactcgtgagcgtccggcgagcgcacttt

SEQ ID NO: 62990 - DNA, 50 bp, synthetic construct
  source 1..50: mol_type = other DNA
aataaaataatccaccttacaatgcagatgttgaggtggattaatttatg

SEQ ID NO: 62991 - DNA, 50 bp, synthetic construct
  source 1..50: mol_type = other DNA
ccctaatcatcctcatagtgcatttaaatacaccatcttaagcgatacaa

SEQ ID NO: 62992 - DNA, 50 bp, synthetic construct
  source 1..50: mol_type = other DNA
gtcaatctggcccccgccgatctgcccagaacaccagatacattgttgca

SEQ ID NO: 62993 - DNA, 50 bp, synthetic construct
  source 1..50: mol_type = other DNA
catgcacacccatcactttagtgagtgaactaatagcgtaggtgtgcaga

SEQ ID NO: 62994 - DNA, 50 bp, synthetic construct
  source 1..50: mol_type = other DNA
gtacttgtttagctatgtaaaagcactagtattcttgccttaacactcat

SEQ ID NO: 62995 - DNA, 50 bp, synthetic construct
  source 1..50: mol_type = other DNA
agtttggacaaaagtgctaccgtctcaacttgttcatcattatccaaacc

SEQ ID NO: 62996 - DNA, 50 bp, synthetic construct
  source 1..50: mol_type = other DNA
cgttgataaaccaaaagaagaaaaatttttctgacctaaattctccaatt

SEQ ID NO: 62997 - DNA, 50 bp, synthetic construct
  source 1..50: mol_type = other DNA
ttgttggcaatcaaagagccataaggttaaagcttttacattggtggaaa

SEQ ID NO: 62998 - DNA, 50 bp, synthetic construct
  source 1..50: mol_type = other DNA
atgaaactattctaggtactaaaaattatccaacagaaaacgattttcaa

SEQ ID NO: 62999 - DNA, 50 bp, synthetic construct
  source 1..50: mol_type = other DNA
ataaggaggaaaataaacctccttggaagattatttatggatctataaat

SEQ ID NO: 63000 - DNA, 50 bp, synthetic construct
  source 1..50: mol_type = other DNA
ttcatcagtgtgtgatgttagctctacttggaattacagaccctaattta

SEQ ID NO: 63001 - DNA, 50 bp, synthetic construct
  source 1..50: mol_type = other DNA
aaaaacaggttactttttatttataacgtaaaaaaacaagccactaaatc

SEQ ID NO: 63002 - DNA, 50 bp, synthetic construct
  source 1..50: mol_type = other DNA
caagttactattgaatggctctagtactacggccattcgtagtatactat

SEQ ID NO: 63003 - DNA, 50 bp, synthetic construct
  source 1..50: mol_type = other DNA
tgcttcaagagtgtatgctactgttgatcgagaagtacacctatgagaag

SEQ ID NO: 63004 - DNA, 50 bp, synthetic construct
  source 1..50: mol_type = other DNA
acggttgtaaatgtatactgtggaattccattgtcaattattactagcgc

SEQ ID NO: 63005 - DNA, 50 bp, synthetic construct
  source 1..50: mol_type = other DNA
gccaccatttcttaccctgtaaattgatttaccgagtgattttcgggcgg

SEQ ID NO: 63006 - DNA, 50 bp, synthetic construct
  source 1..50: mol_type = other DNA
gatagtaaatcgcggtcaaggagagcagtctatgagcgctataatggata

SEQ ID NO: 63007 - DNA, 50 bp, synthetic construct
  source 1..50: mol_type = other DNA
ttaaattacttaataccgtatttcaattgtaacattatttaataatttca

SEQ ID NO: 63008 - DNA, 50 bp, synthetic construct
  source 1..50: mol_type = other DNA
tgattatttttcttgagtttccgcaatggtgcttgaaacaaaaataaagg

SEQ ID NO: 63009 - DNA, 50 bp, synthetic construct
  source 1..50: mol_type = other DNA
attgtcttcccaaacaacaaaatcatttttagcttgttagggagaaccct

SEQ ID NO: 63010 - DNA, 50 bp, synthetic construct
  source 1..50: mol_type = other DNA
gttacattcaaaatctcatcactttcgcaatgctttgattagacatcttg

SEQ ID NO: 63011 - DNA, 50 bp, synthetic construct
  source 1..50: mol_type = other DNA
cagttgattttaaagtcgtacgataatgaaacgcgttttaaagccaacga

SEQ ID NO: 63012 - DNA, 50 bp, synthetic construct
  source 1..50: mol_type = other DNA
tcaccatcctttatatttatcaatatgttctgaagaataaacaatatttt

SEQ ID NO: 63013 - DNA, 50 bp, synthetic construct
  source 1..50: mol_type = other DNA
ggcccccgcgcgtcaagcctcgcctggtgcgcgccgctagcgcgcgagcc

SEQ ID NO: 63014 - DNA, 50 bp, synthetic construct
  source 1..50: mol_type = other DNA
cgatgcggacggcgccgtcaccatcgggtgtgaacgcgctacgcgctcgc

SEQ ID NO: 63015 - DNA, 50 bp, synthetic construct
  source 1..50: mol_type = other DNA
ttaaccatattcgaacagatcgttaacacactatgacaccttatgtgttt

SEQ ID NO: 63016 - DNA, 50 bp, synthetic construct
  source 1..50: mol_type = other DNA
ttcatttgccgctgctgagaattttggatttataaggaggggccaatgag

SEQ ID NO: 63017 - DNA, 50 bp, synthetic construct
  source 1..50: mol_type = other DNA
accatatcttgactttacgctgcgtaatcaggatcgataaaagatatgat

SEQ ID NO: 63018 - DNA, 50 bp, synthetic construct
  source 1..50: mol_type = other DNA
aagggagagggggctttctcatgtctagacgagatgggctggtcccccgc

SEQ ID NO: 63019 - DNA, 50 bp, synthetic construct
  source 1..50: mol_type = other DNA
atgccgcgcagagaccgcgccactcgcgcatcgcctgaaaggcgcggaac

SEQ ID NO: 63020 - DNA, 50 bp, synthetic construct
  source 1..50: mol_type = other DNA
tatcattgcggctctgatctggaaatttgtgcgtctgagcggagtagaac

SEQ ID NO: 63021 - DNA, 50 bp, synthetic construct
  source 1..50: mol_type = other DNA
tgccgaagtttttcgtaaaacacgttaccgcattggctaacacttcgggg

SEQ ID NO: 63022 - DNA, 50 bp, synthetic construct
  source 1..50: mol_type = other DNA
ccatcttgaagcggacacgggcgaaaaaaaccgtctgcgcccggagaagt

SEQ ID NO: 63023 - DNA, 50 bp, synthetic construct
  source 1..50: mol_type = other DNA
tcggaaactgcccttcggctatcacatgaagtgggacaatggcagaaccc

SEQ ID NO: 63024 - DNA, 50 bp, synthetic construct
  source 1..50: mol_type = other DNA
caggcagtcccgcgggggaaccgtccacggtatccgcaatccgtgtatac

SEQ ID NO: 63025 - DNA, 50 bp, synthetic construct
  source 1..50: mol_type = other DNA
cccacattccgggcaggtgatcgtcgacgagaaagcgcctataaatcagg

SEQ ID NO: 63026 - DNA, 50 bp, synthetic construct
  source 1..50: mol_type = other DNA
gtgtgcgcaacctcactttgtattcgcaccaaaagttaggttgtgcacgc

SEQ ID NO: 63027 - DNA, 50 bp, synthetic construct
  source 1..50: mol_type = other DNA
caagggtttatctcaaataaaaaaatttgcatatggagaatcacattgaa

SEQ ID NO: 63028 - DNA, 50 bp, synthetic construct
  source 1..50: mol_type = other DNA
tgcgggcatagcgttacatccttctgaaatgagaccgcgcaggatctcaa

SEQ ID NO: 63029 - DNA, 50 bp, synthetic construct
  source 1..50: mol_type = other DNA
ttaaaaactttataaaaatgaaaaagtagtcatttgcttaaattttttgc

SEQ ID NO: 63030 - DNA, 50 bp, synthetic construct
  source 1..50: mol_type = other DNA
gatcggatggatcatcgctgagagaactctcagcaagtttgagcgccatc

SEQ ID NO: 63031 - DNA, 50 bp, synthetic construct
  source 1..50: mol_type = other DNA
atcgttggaatttgcagcaataaatcactatcctctgtcataggaactct

SEQ ID NO: 63032 - DNA, 50 bp, synthetic construct
  source 1..50: mol_type = other DNA
cgggcaaggttaagaaacccggcccgggccttttttatgcgcgctgccgc

SEQ ID NO: 63033 - DNA, 50 bp, synthetic construct
  source 1..50: mol_type = other DNA
tatacctgcaccgcaaccggaaacgtgtctccggttgcgtagaccatatc

SEQ ID NO: 63034 - DNA, 50 bp, synthetic construct
  source 1..50: mol_type = other DNA
tatcagcaacatacaataccatgttttcagtatattgctctttgatgata

SEQ ID NO: 63035 - DNA, 50 bp, synthetic construct
  source 1..50: mol_type = other DNA
ggcgcgcagcgcatcggcggacgctcctgtgaaccgaagcgacgcgcgcc

SEQ ID NO: 63036 - DNA, 50 bp, synthetic construct
  source 1..50: mol_type = other DNA
gcttaacttttaacgactgcggtaaccgttcgtgccttgtcaaggccgcc

SEQ ID NO: 63037 - DNA, 50 bp, synthetic construct
  source 1..50: mol_type = other DNA
tgggatataatttttgtttaatttttggattttactacaattaaaaagca

SEQ ID NO: 63038 - DNA, 50 bp, synthetic construct
  source 1..50: mol_type = other DNA
gccggtgccgtgaaagcttctgaacgttcctcggccttgttgatgccggt

SEQ ID NO: 63039 - DNA, 50 bp, synthetic construct
  source 1..50: mol_type = other DNA
tatcatcgcctgtgtatgggtgtcacgcacctatgacatttgccgcgact

SEQ ID NO: 63040 - DNA, 50 bp, synthetic construct
  source 1..50: mol_type = other DNA
gtgtatcataagaaaggtgtaatcctgaagatacctttctattgatacac

SEQ ID NO: 63041 - DNA, 50 bp, synthetic construct
  source 1..50: mol_type = other DNA
gaaagagacgaaccgtggaaaacacgtacccttaacggatgaaatattga

SEQ ID NO: 63042 - DNA, 50 bp, synthetic construct
  source 1..50: mol_type = other DNA
ttgttcgttgtagcaacactacacacgtgcgttgttttctttatttgtac

SEQ ID NO: 63043 - DNA, 50 bp, synthetic construct
  source 1..50: mol_type = other DNA
cttttcttatcgaaatgtattcgactacacgaccattaccatcagagaat

SEQ ID NO: 63044 - DNA, 50 bp, synthetic construct
  source 1..50: mol_type = other DNA
ttcactctttgtatcaacgctatgcataggataggaactcaaattattaa

SEQ ID NO: 63045 - DNA, 50 bp, synthetic construct
  source 1..50: mol_type = other DNA
ggtcaagtaaaggtattctttgagaaaatcaagaatatgaggactaagtg

SEQ ID NO: 63046 - DNA, 50 bp, synthetic construct
  source 1..50: mol_type = other DNA
cattgaaattgaagttgaatgagaaaggatatggggcttactgttcaaga

SEQ ID NO: 63047 - DNA, 50 bp, synthetic construct
  source 1..50: mol_type = other DNA
tttagtccctcgttttctctcgttggaagaagaagaaacgagatgccaaa

SEQ ID NO: 63048 - DNA, 50 bp, synthetic construct
  source 1..50: mol_type = other DNA
tttagtttctcatttcctctcactggagggagaggaaatgggatacaaaa

SEQ ID NO: 63049 - DNA, 50 bp, synthetic construct
  source 1..50: mol_type = other DNA
cctccgatggcgctggtggcccgctcggaatcgacaagggccttcgggca

SEQ ID NO: 63050 - DNA, 50 bp, synthetic construct
  source 1..50: mol_type = other DNA
tcggcacggccgagcttgagagccgcggacgaggatgctgcgcgtgccga

SEQ ID NO: 63051 - DNA, 50 bp, synthetic construct
  source 1..50: mol_type = other DNA
ggtggcctcgttgagccgggtcatggtgaacccggttcttgacggacttt

SEQ ID NO: 63052 - DNA, 50 bp, synthetic construct
  source 1..50: mol_type = other DNA
ttagtggttctgtactgaaatggcgcgccgcaccgagcgatgatgacaac

SEQ ID NO: 63053 - DNA, 50 bp, synthetic construct
  source 1..50: mol_type = other DNA
gtcgaatgctctaccgctgagctatcgcgcgcagccgtttccttgacctt

SEQ ID NO: 63054 - DNA, 50 bp, synthetic construct
  source 1..50: mol_type = other DNA
ctttatgtttgcgtcaacacaagcatacttgtataagcgcaaacactgtt

SEQ ID NO: 63055 - DNA, 50 bp, synthetic construct
  source 1..50: mol_type = other DNA
gggatgcacagcccgtccgtggcggacgccactgacggccagtacacccg

SEQ ID NO: 63056 - DNA, 50 bp, synthetic construct
  source 1..50: mol_type = other DNA
agtcgttgcgtcatcttagatttctggaagtcctagaagaagcttgtaac

SEQ ID NO: 63057 - DNA, 50 bp, synthetic construct
  source 1..50: mol_type = other DNA
ctcaccgtcgtgtggctgatcgcccaccttctaccatacacgagcagcga

SEQ ID NO: 63058 - DNA, 50 bp, synthetic construct
  source 1..50: mol_type = other DNA
ttaacacccccaacacgatatctgctcaggcgtcgttttgggggtgtgaa

SEQ ID NO: 63059 - DNA, 50 bp, synthetic construct
  source 1..50: mol_type = other DNA
ggccgccaccggcggggcgggttacgctcttcacccgctcaggggcggcc

SEQ ID NO: 63060 - DNA, 50 bp, synthetic construct
  source 1..50: mol_type = other DNA
tttttctaacaataacgctacctcttcctttgatgttatttttaaacttt

SEQ ID NO: 63061 - DNA, 50 bp, synthetic construct
  source 1..50: mol_type = other DNA
cacaactatacaagtatttttcaaattccaaaaacactttcactattata

SEQ ID NO: 63062 - DNA, 50 bp, synthetic construct
  source 1..50: mol_type = other DNA
aacataaaagattaaaccgtattcaagaacaaggttttaacttttatgtc

SEQ ID NO: 63063 - DNA, 50 bp, synthetic construct
  source 1..50: mol_type = other DNA
tcgacggtatacttaagtcttaagcttcagcctttgaagcgaacggcaga

SEQ ID NO: 63064 - DNA, 50 bp, synthetic construct
  source 1..50: mol_type = other DNA
tttggttattctttggttattctaactaagctacccgtacccaatagata

SEQ ID NO: 63065 - DNA, 50 bp, synthetic construct
  source 1..50: mol_type = other DNA
ctgttgtagatgaaatagcagcagaacgacttccataatatctccaatat

SEQ ID NO: 63066 - DNA, 50 bp, synthetic construct
  source 1..50: mol_type = other DNA
ttgaaatagatattgagatataggatcctttttcttcatatccttatcta

SEQ ID NO: 63067 - DNA, 50 bp, synthetic construct
  source 1..50: mol_type = other DNA
ctaacggtaatactgatgtttttactttctaaacttcctaacagacttaa

SEQ ID NO: 63068 - DNA, 50 bp, synthetic construct
  source 1..50: mol_type = other DNA
tggaaggtgatccagatgaaccaactcgcggcgcactggatcgcctcgcg

SEQ ID NO: 63069 - DNA, 50 bp, synthetic construct
  source 1..50: mol_type = other DNA
gcccgcggccggctcgacgcccctgcagcgggaaggggccactcgctcgt

SEQ ID NO: 63070 - DNA, 50 bp, synthetic construct
  source 1..50: mol_type = other DNA
gccgtgctgacctccccggcctgggccagggcgccaccgcacaggacgcc

SEQ ID NO: 63071 - DNA, 50 bp, synthetic construct
  source 1..50: mol_type = other DNA
cgacagcggagcatcaggagtcatgctcggctcgccctgatccgctggat

SEQ ID NO: 63072 - DNA, 50 bp, synthetic construct
  source 1..50: mol_type = other DNA
aaattggtgcatcctgttccttgacgggccagagagtgatgaatgtcgtt

SEQ ID NO: 63073 - DNA, 50 bp, synthetic construct
  source 1..50: mol_type = other DNA
cctgcggcgtttttctatcgtaaaattctcccgtacctttccgcccggta

SEQ ID NO: 63074 - DNA, 50 bp, synthetic construct
  source 1..50: mol_type = other DNA
atccaggaagagtttggctcctttgataaggaggtgctttgttcatgaca

SEQ ID NO: 63075 - DNA, 50 bp, synthetic construct
  source 1..50: mol_type = other DNA
ctcatggatatcctcctcaaccggccccggtactatgggcactccatgtc

SEQ ID NO: 63076 - DNA, 50 bp, synthetic construct
  source 1..50: mol_type = other DNA
ccgcgtctcgcgaccgaacgcagccaacctcgttcgcacgattgcccgcc

SEQ ID NO: 63077 - DNA, 50 bp, synthetic construct
  source 1..50: mol_type = other DNA
ggactggacgggatccagacctgggcctaaatcttccagaccggcagtcc

SEQ ID NO: 63078 - DNA, 50 bp, synthetic construct
  source 1..50: mol_type = other DNA
aataggctaaagaggcaatgtattatcctacttttggttgataagcaggt

SEQ ID NO: 63079 - DNA, 50 bp, synthetic construct
  source 1..50: mol_type = other DNA
gattgaaagctataaccgtgtcaaaaaagctaaggttaaagcttttacat

SEQ ID NO: 63080 - DNA, 50 bp, synthetic construct
  source 1..50: mol_type = other DNA
cttttttctataagatggaaaatacagaatattcaatccaatcaaaaaac

SEQ ID NO: 63081 - DNA, 50 bp, synthetic construct
  source 1..50: mol_type = other DNA
gcacacgtatgtgcagttgatggaataccttcgtctgcataaatacctgc

SEQ ID NO: 63082 - DNA, 50 bp, synthetic construct
  source 1..50: mol_type = other DNA
agtagccaatttgctcgattttcatacgaaaattgattaaacgaaagacc

SEQ ID NO: 63083 - DNA, 50 bp, synthetic construct
  source 1..50: mol_type = other DNA
tttattttttcttttgacatagtattaactgaacgacagaaaaaaacaat

SEQ ID NO: 63084 - DNA, 50 bp, synthetic construct
  source 1..50: mol_type = other DNA
cacgcttgaactcaccagagaagggtatttttcactgtatttcaaggttt

SEQ ID NO: 63085 - DNA, 50 bp, synthetic construct
  source 1..50: mol_type = other DNA
taaaattacatagtaaatatatattttaatatatcttggatgtaattttc

SEQ ID NO: 63086 - DNA, 50 bp, synthetic construct
  source 1..50: mol_type = other DNA
tttttaccacaacgtgtcatcagaataatgatgtcgtatgaagctagaag

SEQ ID NO: 63087 - DNA, 50 bp, synthetic construct
  source 1..50: mol_type = other DNA
gtaccacggaatagcgggggctgtatactactacgtttattgcgtcgtac

SEQ ID NO: 63088 - DNA, 50 bp, synthetic construct
  source 1..50: mol_type = other DNA
atagcattaacctcaatatccttattaaaagatattaactttaaatctat

SEQ ID NO: 63089 - DNA, 50 bp, synthetic construct
  source 1..50: mol_type = other DNA
cagcaaaagccccacgtgtaggaatgatccggtccttggtggcgctgcgc

SEQ ID NO: 63090 - DNA, 50 bp, synthetic construct
  source 1..50: mol_type = other DNA
tgtacttatattgagcaacctattctaataaactaatttgtattgactca

SEQ ID NO: 63091 - DNA, 50 bp, synthetic construct
  source 1..50: mol_type = other DNA
aaacccttatatatcaacgatttcaggaaaccctttatctataagtgttt

SEQ ID NO: 63092 - DNA, 50 bp, synthetic construct
  source 1..50: mol_type = other DNA
tcagtagtaaagatttgtagtcattactaactacaagtatacaaaaaaag

SEQ ID NO: 63093 - DNA, 50 bp, synthetic construct
  source 1..50: mol_type = other DNA
ctaatactttctatgctggcatcatttgatgaaatagaagaaaaagagaa

SEQ ID NO: 63094 - DNA, 50 bp, synthetic construct
  source 1..50: mol_type = other DNA
gctctgtctttgttctcagctttccagacgatggagagaaacgcctgaga

SEQ ID NO: 63095 - DNA, 50 bp, synthetic construct
  source 1..50: mol_type = other DNA
cctggtcgacatcgctgggctggccgggaggcacagcggcctccacgagg

SEQ ID NO: 63096 - DNA, 50 bp, synthetic construct
  source 1..50: mol_type = other DNA
tatgctgcaggaagtccctttaggtgatcggtacgctgtccagcaccatg

SEQ ID NO: 63097 - DNA, 50 bp, synthetic construct
  source 1..50: mol_type = other DNA
caatgtacgttgggcgtgcggcccatggaaagaactacagcgaaaccagc

SEQ ID NO: 63098 - DNA, 50 bp, synthetic construct
  source 1..50: mol_type = other DNA
gtttcgtgatattggaaacgttaccggtattgtcttcagtataatgggtt

SEQ ID NO: 63099 - DNA, 50 bp, synthetic construct
  source 1..50: mol_type = other DNA
gattatcatttaaagatgaacttataaggtttcagagttaactgtgaaga

SEQ ID NO: 63100 - DNA, 50 bp, synthetic construct
  source 1..50: mol_type = other DNA
taattgaataagtaattaaggttctcgtattccctgaactttggtaaaat

SEQ ID NO: 63101 - DNA, 50 bp, synthetic construct
  source 1..50: mol_type = other DNA
gattaattaaatacggtacaaaacttaaaaagtaaattgtttgattcatc

SEQ ID NO: 63102 - DNA, 50 bp, synthetic construct
  source 1..50: mol_type = other DNA
cacatgcacacctatcactttagtgagctgatagcataggtgtgcagata

SEQ ID NO: 63103 - DNA, 50 bp, synthetic construct
  source 1..50: mol_type = other DNA
ttagaaggtagttaaataaggttaatttaccttttatatttactatcgaa

SEQ ID NO: 63104 - DNA, 50 bp, synthetic construct
  source 1..50: mol_type = other DNA
ttgtgcattaagaacacctttgttataaaaaaggagacccgaaggtctcc

SEQ ID NO: 63105 - DNA, 50 bp, synthetic construct
  source 1..50: mol_type = other DNA
attaattaaatacggtacaaaactttaagtatggaccatattgtattaac

SEQ ID NO: 63106 - DNA, 50 bp, synthetic construct
  source 1..50: mol_type = other DNA
tgtatcaaattgagaactcacaccgaagtgtgagttctaaaattgataca

SEQ ID NO: 63107 - DNA, 50 bp, synthetic construct
  source 1..50: mol_type = other DNA
cattgcacttttattaagagtactgatgttctcatcacaaaaatgcgatg

SEQ ID NO: 63108 - DNA, 50 bp, synthetic construct
  source 1..50: mol_type = other DNA
agattagtgacaatcaagtgaaaacttttcagtttgattatgaaaaattt

SEQ ID NO: 63109 - DNA, 50 bp, synthetic construct
  source 1..50: mol_type = other DNA
acttatgaaaagataatcaaatttaaaaatctgattatcccctagaacac

SEQ ID NO: 63110 - DNA, 50 bp, synthetic construct
  source 1..50: mol_type = other DNA
caatgacatcgtttcgagttcacaattatgaacacaaaagaacgtcaaaa

SEQ ID NO: 63111 - DNA, 50 bp, synthetic construct
  source 1..50: mol_type = other DNA
actatcttcgcacagcactcaacatgccttgagtgctgagtgtagacaaa

SEQ ID NO: 63112 - DNA, 50 bp, synthetic construct
  source 1..50: mol_type = other DNA
ttgtgggaaagcagtactaccgtctcaacggtattacctttttcccacaa

SEQ ID NO: 63113 - DNA, 50 bp, synthetic construct
  source 1..50: mol_type = other DNA
catactatggtaaacaaacaaatgtatataatggtgtcataatcatgatg

SEQ ID NO: 63114 - DNA, 50 bp, synthetic construct
  source 1..50: mol_type = other DNA
agctatttttaaaggtgaatgggtaaaagagttcacctttaaatagcttg

SEQ ID NO: 63115 - DNA, 50 bp, synthetic construct
  source 1..50: mol_type = other DNA
tagaagttataattgaataataaaataaatataaaaaattataagtgata

SEQ ID NO: 63116 - DNA, 50 bp, synthetic construct
  source 1..50: mol_type = other DNA
acaaagtataaacttctaaatttaattaacttaacctatttataaaacta

SEQ ID NO: 63117 - DNA, 50 bp, synthetic construct
  source 1..50: mol_type = other DNA
tgctgatcatagaaaagcagtattttatattggctggatattgctcagca

SEQ ID NO: 63118 - DNA, 50 bp, synthetic construct
  source 1..50: mol_type = other DNA
atagtcattagacaaataagaactagagttaacattggtagctgaaaggg

SEQ ID NO: 63119 - DNA, 50 bp, synthetic construct
  source 1..50: mol_type = other DNA
attatatacaaatttgatgaatttaagtgctcatcattgttgcaactaat

SEQ ID NO: 63120 - DNA, 50 bp, synthetic construct
  source 1..50: mol_type = other DNA
ttgaatttattaatatagagtatttaaataccgtcaaattataaattagg

SEQ ID NO: 63121 - DNA, 50 bp, synthetic construct
  source 1..50: mol_type = other DNA
aagaatacaaatgcattagcagctgcaactgcaggtgcatttgggcgcta

SEQ ID NO: 63122 - DNA, 50 bp, synthetic construct
  source 1..50: mol_type = other DNA
aagctccgttacttgtgatacggttctccgtaccttactctacggagcta

SEQ ID NO: 63123 - DNA, 50 bp, synthetic construct
  source 1..50: mol_type = other DNA
tatgaataataattatatattttttaacaaatagataaaatttaataata

SEQ ID NO: 63124 - DNA, 50 bp, synthetic construct
  source 1..50: mol_type = other DNA
aaaattacaatttttaacgaaaaaattgtaccataaaataggagtggtta

SEQ ID NO: 63125 - DNA, 50 bp, synthetic construct
  source 1..50: mol_type = other DNA
agtaaaaaaaagatttctaattgaattaaattagtaagtatttttttcat

SEQ ID NO: 63126 - DNA, 50 bp, synthetic construct
  source 1..50: mol_type = other DNA
tttaaaaatcatgctaggtgtaaagaggtacaaattcaatgataactaca

SEQ ID NO: 63127 - DNA, 50 bp, synthetic construct
  source 1..50: mol_type = other DNA
tattacgacgggcatcctttctggaatataaaaggggtacactcgtaccc

SEQ ID NO: 63128 - DNA, 50 bp, synthetic construct
  source 1..50: mol_type = other DNA
aacagtaatttgcttccaatcatcaccatgatatactgctttttactgtt

SEQ ID NO: 63129 - DNA, 50 bp, synthetic construct
  source 1..50: mol_type = other DNA
atttaatcaataatgtttttagtttaaactaataacttttatgattaaat

SEQ ID NO: 63130 - DNA, 50 bp, synthetic construct
  source 1..50: mol_type = other DNA
gggctggtgaccatcagccgggcgcgcggctggctgacgcacaccttatg

SEQ ID NO: 63131 - DNA, 50 bp, synthetic construct
  source 1..50: mol_type = other DNA
acccccacaaaattacttttctcatcagtgtgtgttatatttgtgggggt

SEQ ID NO: 63132 - DNA, 50 bp, synthetic construct
  source 1..50: mol_type = other DNA
tgagcctgacgagctacctggctgctgagcgcagtgcctcttcagcaact

SEQ ID NO: 63133 - DNA, 50 bp, synthetic construct
  source 1..50: mol_type = other DNA
actctaataatactaatattaataattactgctataagacttgataaata

SEQ ID NO: 63134 - DNA, 50 bp, synthetic construct
  source 1..50: mol_type = other DNA
tttgctttgcttacaaatggtataatacatctatttgtatataaatcaag

SEQ ID NO: 63135 - DNA, 50 bp, synthetic construct
  source 1..50: mol_type = other DNA
ccggcctgtcgaagtccgacgccacaggttggccagcttgcgcaggccgg

SEQ ID NO: 63136 - DNA, 50 bp, synthetic construct
  source 1..50: mol_type = other DNA
gtatttctgcgcatatgggatgtccggcataaaacagttgaaagaatggc

SEQ ID NO: 63137 - DNA, 50 bp, synthetic construct
  source 1..50: mol_type = other DNA
aaataaaaatcccaatttacagaacattaaggaaatcgggaatattattt

SEQ ID NO: 63138 - DNA, 50 bp, synthetic construct
  source 1..50: mol_type = other DNA
cagctcataggcgccaatgacctgcgctggcgattatgtccttcacgctg

SEQ ID NO: 63139 - DNA, 50 bp, synthetic construct
  source 1..50: mol_type = other DNA
atacgggcgttttcttccttatatagaatcttctggcaaaaagccaatat

SEQ ID NO: 63140 - DNA, 50 bp, synthetic construct
  source 1..50: mol_type = other DNA
tcaagtgccggtacagtaagaaaatattttctgctatgtcgttgacttcc

SEQ ID NO: 63141 - DNA, 50 bp, synthetic construct
  source 1..50: mol_type = other DNA
gtgggttagtcgcatacgtcgcgtaattacctattaacgccataacccat

SEQ ID NO: 63142 - DNA, 50 bp, synthetic construct
  source 1..50: mol_type = other DNA
ctttatacgcctccaatttacttttaaaaataaagatcataacaataaaa

SEQ ID NO: 63143 - DNA, 50 bp, synthetic construct
  source 1..50: mol_type = other DNA
ctaaaattcattgattttccatggaatcgttttaagataatgaagtttca

SEQ ID NO: 63144 - DNA, 50 bp, synthetic construct
  source 1..50: mol_type = other DNA
tgagagggcggacacccaatcattctattgcatgggtgtcgatttcaaca

SEQ ID NO: 63145 - DNA, 50 bp, synthetic construct
  source 1..50: mol_type = other DNA
catgttccgggaggaagaggagctggcgctccgcatgcggccggaacccc

SEQ ID NO: 63146 - DNA, 50 bp, synthetic construct
  source 1..50: mol_type = other DNA
ccggtttgacgatctcataatcaacgcggatgctgtcatgatcaaacgta

SEQ ID NO: 63147 - DNA, 50 bp, synthetic construct
  source 1..50: mol_type = other DNA
gtacttcatactgtgtctaatgttgatacactagacgctgtatgaagtac

SEQ ID NO: 63148 - DNA, 50 bp, synthetic construct
  source 1..50: mol_type = other DNA
tgggctccgatcgcggcgacccaaccgtcgggccgccggatcccattccg

SEQ ID NO: 63149 - DNA, 50 bp, synthetic construct
  source 1..50: mol_type = other DNA
gcattttatatcactccttcgttaatgccgaaagaagtctattaccatgc

SEQ ID NO: 63150 - DNA, 50 bp, synthetic construct
  source 1..50: mol_type = other DNA
gcaggctcctcacccttggcccggcgccaggccgcccgcgactttgtcaa

SEQ ID NO: 63151 - DNA, 50 bp, synthetic construct
  source 1..50: mol_type = other DNA
cacaatcgcggtggcatgcgcgaagcccccgacgtgcctttcgatttgag

SEQ ID NO: 63152 - DNA, 50 bp, synthetic construct
  source 1..50: mol_type = other DNA
ctagcttagctgtagaatcttttctaacccatgctctgtttttaaatcat

SEQ ID NO: 63153 - DNA, 50 bp, synthetic construct
  source 1..50: mol_type = other DNA
aaaagccattaatagcaaggcttttaaaagttgcaaaattaacatccttc

SEQ ID NO: 63154 - DNA, 50 bp, synthetic construct
  source 1..50: mol_type = other DNA
agccgaagtccggcaaaagtttgaaatgtaacatctgccggacgacggca

SEQ ID NO: 63155 - DNA, 50 bp, synthetic construct
  source 1..50: mol_type = other DNA
gtattgcaatgacaaattattatatagcaaaggatttactcttctcttat

SEQ ID NO: 63156 - DNA, 50 bp, synthetic construct
  source 1..50: mol_type = other DNA
tttgagttttcagaaataacacaacttcttgtgatttcagatttttcttc

SEQ ID NO: 63157 - DNA, 50 bp, synthetic construct
  source 1..50: mol_type = other DNA
catgcaattgattctcatttaaagatcattcccagaagatgattgattta

SEQ ID NO: 63158 - DNA, 50 bp, synthetic construct
  source 1..50: mol_type = other DNA
gactatgcccttgctaagtatgttcttgtcaggtcggcaaggggggagta

SEQ ID NO: 63159 - DNA, 50 bp, synthetic construct
  source 1..50: mol_type = other DNA
agcggcctaaatcgacgtataacaagcaattgctaaagagttaggcatta

SEQ ID NO: 63160 - DNA, 50 bp, synthetic construct
  source 1..50: mol_type = other DNA
ttttatttaaatgaaactgttttacagataatagtttcatttaaacaaaa

SEQ ID NO: 63161 - DNA, 50 bp, synthetic construct
  source 1..50: mol_type = other DNA
cgccacgatgatcggcgggctgctgcatcgaccagcttgtcgtggtcgcg

SEQ ID NO: 63162 - DNA, 50 bp, synthetic construct
  source 1..50: mol_type = other DNA
taatcgtaaaagtgccgttgttccaacgtgcagcactcatttgtcgagtt

SEQ ID NO: 63163 - DNA, 50 bp, synthetic construct
  source 1..50: mol_type = other DNA
cccctgcgagaagccgggccgcctctacgccgcgcggcatcatgcagagg

SEQ ID NO: 63164 - DNA, 50 bp, synthetic construct
  source 1..50: mol_type = other DNA
gatatggttagtattggtggagatgaagaaagaaaaattataaccatagg

SEQ ID NO: 63165 - DNA, 50 bp, synthetic construct
  source 1..50: mol_type = other DNA
acataagaaaggatctaagtcggggtttccgaagtgtgactataacatta

SEQ ID NO: 63166 - DNA, 50 bp, synthetic construct
  source 1..50: mol_type = other DNA
cctccatgtcctacccctttccttggggttcaagaggccgtgagttcgat

SEQ ID NO: 63167 - DNA, 50 bp, synthetic construct
  source 1..50: mol_type = other DNA
tgaataagtaactttacaaaactagagcaattcttgaaaatagttagata

SEQ ID NO: 63168 - DNA, 50 bp, synthetic construct
  source 1..50: mol_type = other DNA
ctgtgtgcccttgtcaagcgatgtttacatcgcttgacaagggcacacag

SEQ ID NO: 63169 - DNA, 50 bp, synthetic construct
  source 1..50: mol_type = other DNA
aaaccgcagtgatgaggagatggatttccatatcctctttagtagcgttt

SEQ ID NO: 63170 - DNA, 50 bp, synthetic construct
  source 1..50: mol_type = other DNA
agcagttagaagaagcaaagcaaatagccctgtttgcgggagtaacatct

SEQ ID NO: 63171 - DNA, 50 bp, synthetic construct
  source 1..50: mol_type = other DNA
tccaaaacaaattttggatatgagtactaaaatttgtaattcctaaaata

SEQ ID NO: 63172 - DNA, 50 bp, synthetic construct
  source 1..50: mol_type = other DNA
agaaagtccttgacaagttgttacaggagtaatagaattaaggagaacac

SEQ ID NO: 63173 - DNA, 50 bp, synthetic construct
  source 1..50: mol_type = other DNA
aacagggctaacaaaagctatcctcttttaaagcttttcaaaagccttag

SEQ ID NO: 63174 - DNA, 50 bp, synthetic construct
  source 1..50: mol_type = other DNA
ttataataataaaaaccgcatcacttgtgatacgcttctgcgtatcggtt

SEQ ID NO: 63175 - DNA, 50 bp, synthetic construct
  source 1..50: mol_type = other DNA
aagatttccttattctcataaccatcgatttatgagccattggaaatctc

SEQ ID NO: 63176 - DNA, 50 bp, synthetic construct
  source 1..50: mol_type = other DNA
atgtaatggcacactatatatcactcctagcctaacacagcccatagcat

SEQ ID NO: 63177 - DNA, 50 bp, synthetic construct
  source 1..50: mol_type = other DNA
atcagatgagcttgtcaaagaatttccaacagatgattgaagatacctat

SEQ ID NO: 63178 - DNA, 50 bp, synthetic construct
  source 1..50: mol_type = other DNA
tcaattggaaaatataaataattttacccattttatcattttttaggaaa

SEQ ID NO: 63179 - DNA, 50 bp, synthetic construct
  source 1..50: mol_type = other DNA
tgagatagaaaagagtgagaattttaaaattatttatattttccaattga

SEQ ID NO: 63180 - DNA, 50 bp, synthetic construct
  source 1..50: mol_type = other DNA
caaatatgcaaataagtaaaatgatatcatttttgttttttaaatatttt

SEQ ID NO: 63181 - DNA, 50 bp, synthetic construct
  source 1..50: mol_type = other DNA
atatcaataaattttgagttatcattgtcgacatcaagtttggacaatag

SEQ ID NO: 63182 - DNA, 50 bp, synthetic construct
  source 1..50: mol_type = other DNA
tatttttatacgtgtactaacctatataagttagtacacataaattatat

SEQ ID NO: 63183 - DNA, 50 bp, synthetic construct
  source 1..50: mol_type = other DNA
ctctgccccttgaacttgatcgacgagccgaagatgctcaagggagatac

SEQ ID NO: 63184 - DNA, 50 bp, synthetic construct
  source 1..50: mol_type = other DNA
gctgacaaggggtacgcgaaacagcgctcgagtatttagcgcttgccagc

SEQ ID NO: 63185 - DNA, 50 bp, synthetic construct
  source 1..50: mol_type = other DNA
ctcctagtcagacagggtttcaggttcctgtcaccttcgcttcttaagaa

SEQ ID NO: 63186 - DNA, 50 bp, synthetic construct
  source 1..50: mol_type = other DNA
gttttttcgcgttgtttagtctctcgagaaactaaaatcataaataaaaa

SEQ ID NO: 63187 - DNA, 50 bp, synthetic construct
  source 1..50: mol_type = other DNA
caggccaagggttcgtatacggagctgctcgtccgtgaccaagaactggc

SEQ ID NO: 63188 - DNA, 50 bp, synthetic construct
  source 1..50: mol_type = other DNA
gacaagggttcgtatacggagcttgtcagcctgtggtggccctccttacc

SEQ ID NO: 63189 - DNA, 50 bp, synthetic construct
  source 1..50: mol_type = other DNA
ggagtaagcctgcaagatctccgctctctccgccatctcatgcttactcg

SEQ ID NO: 63190 - DNA, 50 bp, synthetic construct
  source 1..50: mol_type = other DNA
aggcacgttggtgttacttcattgtaaaatgaaaaaatcagaaggtaagc

SEQ ID NO: 63191 - DNA, 50 bp, synthetic construct
  source 1..50: mol_type = other DNA
tactagttttatataaatattagtttgctaacaggagtcaaaaacgagag

SEQ ID NO: 63192 - DNA, 50 bp, synthetic construct
  source 1..50: mol_type = other DNA
ttctattgcattgtttgaaatttaataaacggattaaccatggaagccaa

SEQ ID NO: 63193 - DNA, 50 bp, synthetic construct
  source 1..50: mol_type = other DNA
gacacggaagcggatctgttgaggatcctccccagaagcgatcacgaatc

SEQ ID NO: 63194 - DNA, 50 bp, synthetic construct
  source 1..50: mol_type = other DNA
agatggaacagtatatataaccgcagatttctcatgatacatacgtctaa

SEQ ID NO: 63195 - DNA, 50 bp, synthetic construct
  source 1..50: mol_type = other DNA
tgttgtcaaattgaccacccaatcttgatattttggctaatttgacactc

SEQ ID NO: 63196 - DNA, 50 bp, synthetic construct
  source 1..50: mol_type = other DNA
cttgcatcgattaattgaacgaatagaaaattgacactatcgtatcccaa

SEQ ID NO: 63197 - DNA, 50 bp, synthetic construct
  source 1..50: mol_type = other DNA
tacttgcgcaactgtgttcctccatgtgcagggtgttaattgcgcaaatg

SEQ ID NO: 63198 - DNA, 50 bp, synthetic construct
  source 1..50: mol_type = other DNA
aacacggtgatacacaaagacttttttgtttcctcctgtatctgactatt

SEQ ID NO: 63199 - DNA, 50 bp, synthetic construct
  source 1..50: mol_type = other DNA
caatttcttataaaataatgaaatatatttaaactttggaggagctagta

SEQ ID NO: 63200 - DNA, 50 bp, synthetic construct
  source 1..50: mol_type = other DNA
tggctaagcttggaaaaaatgaaaatattcatttgtttttatgttagcat

SEQ ID NO: 63201 - DNA, 50 bp, synthetic construct
  source 1..50: mol_type = other DNA
atctcagctaaaaaaggggagaaagttttccttctttttttacaatagat

SEQ ID NO: 63202 - DNA, 50 bp, synthetic construct
  source 1..50: mol_type = other DNA
atggacatttggagcaagtaatgccagcgattctacgggaatatgtccat

SEQ ID NO: 63203 - DNA, 50 bp, synthetic construct
  source 1..50: mol_type = other DNA
tttatatgtaaactattttaaaaatattattacaatgtctcagatttaaa

SEQ ID NO: 63204 - DNA, 50 bp, synthetic construct
  source 1..50: mol_type = other DNA
atatcaagaaaagaaaaataatatagataatgcccgatattccttgatat

SEQ ID NO: 63205 - DNA, 50 bp, synthetic construct
  source 1..50: mol_type = other DNA
atattctcttgattggtggttttctttaaaacccaagcgtttaagtatat

SEQ ID NO: 63206 - DNA, 50 bp, synthetic construct
  source 1..50: mol_type = other DNA
cgtggcaatgacagatataaaaaatattgaaaatagttggaacaagtact

SEQ ID NO: 63207 - DNA, 50 bp, synthetic construct
  source 1..50: mol_type = other DNA
ggaaaagcacaatccagacggaaccggatccttcaattatatggaattcc

SEQ ID NO: 63208 - DNA, 50 bp, synthetic construct
  source 1..50: mol_type = other DNA
gggcgcttttaggtcattctcgactcgtcgaggatgactcaaaggcgtac

SEQ ID NO: 63209 - DNA, 50 bp, synthetic construct
  source 1..50: mol_type = other DNA
cggtatcaaaatcttgtaggtgagtacccaccggaaacactttgatacca

SEQ ID NO: 63210 - DNA, 50 bp, synthetic construct
  source 1..50: mol_type = other DNA
agaagaggccgcatggcctctttttttagcgtagttcttcaacgggataa

SEQ ID NO: 63211 - DNA, 50 bp, synthetic construct
  source 1..50: mol_type = other DNA
tggcttatatccaacaccaccgagagcgctgttgtcgagcgtgtaagcca

SEQ ID NO: 63212 - DNA, 50 bp, synthetic construct
  source 1..50: mol_type = other DNA
gtctcatggtgataaactcccatgcaggcatgaaattacgcagatggttt

SEQ ID NO: 63213 - DNA, 50 bp, synthetic construct
  source 1..50: mol_type = other DNA
tgcttctgctaatttactggtgccacttacacaaccaggtagtcctgacc

SEQ ID NO: 63214 - DNA, 50 bp, synthetic construct
  source 1..50: mol_type = other DNA
aattcctttttgcaatcactacacatgtgtagtgtttgcaaatcaaaata

SEQ ID NO: 63215 - DNA, 50 bp, synthetic construct
  source 1..50: mol_type = other DNA
ggtcaagatgacgctttactagttagtgatagtaaagcagaagtttgaat

SEQ ID NO: 63216 - DNA, 50 bp, synthetic construct
  source 1..50: mol_type = other DNA
aatccagaggacgctttactagttagtgatagtaaagcggaagtttgaga

SEQ ID NO: 63217 - DNA, 50 bp, synthetic construct
  source 1..50: mol_type = other DNA
tcactccttataaaaaaaggcgggtattttaatttcctcataaggaggtg

SEQ ID NO: 63218 - DNA, 50 bp, synthetic construct
  source 1..50: mol_type = other DNA
agttgtatttaaggccgatgcagttgaaagaatcgacctgacatatgact

SEQ ID NO: 63219 - DNA, 50 bp, synthetic construct
  source 1..50: mol_type = other DNA
gaggatgaactgtaattaatcatctttatggttgagcacagttcatccca

SEQ ID NO: 63220 - DNA, 50 bp, synthetic construct
  source 1..50: mol_type = other DNA
ttaatttatcaatattaagcaccttaaggtgcttaaaaatcgttgaagaa

SEQ ID NO: 63221 - DNA, 50 bp, synthetic construct
  source 1..50: mol_type = other DNA
ggcaaggccaagttcacgttcaacaactgaaaaatgaaaaaatgctttat

SEQ ID NO: 63222 - DNA, 50 bp, synthetic construct
  source 1..50: mol_type = other DNA
acataattgtataagctttatggtttaacataaatacttttttatttttg

SEQ ID NO: 63223 - DNA, 50 bp, synthetic construct
  source 1..50: mol_type = other DNA
tatctttcacaatgatgtaaagtttactaattacaaaaatcagaaaaaca

SEQ ID NO: 63224 - DNA, 50 bp, synthetic construct
  source 1..50: mol_type = other DNA
taagttacaaaaaattatggaaattaattttcatacagttgtctaacctg

SEQ ID NO: 63225 - DNA, 50 bp, synthetic construct
  source 1..50: mol_type = other DNA
cttggttcgtagtaagacccgctcgggagccaaatttcgctgctatgaac

SEQ ID NO: 63226 - DNA, 50 bp, synthetic construct
  source 1..50: mol_type = other DNA
atatgatgaatgggtggaagcatttaaacgcacaaaacaatagaaaatag

SEQ ID NO: 63227 - DNA, 50 bp, synthetic construct
  source 1..50: mol_type = other DNA
taccgggtgtaaagcgcgactgtcgcgcaagttgtcgtttacacccctaa

SEQ ID NO: 63228 - DNA, 50 bp, synthetic construct
  source 1..50: mol_type = other DNA
gttcaacagagcgtgcgggaagcgcgggcacaccaaaccaagataatccg

SEQ ID NO: 63229 - DNA, 50 bp, synthetic construct
  source 1..50: mol_type = other DNA
ggagcccggccgggtcgaagggtccgatcagctcgaccgcgtcggaatcc

SEQ ID NO: 63230 - DNA, 50 bp, synthetic construct
  source 1..50: mol_type = other DNA
gtttaaaggtttgcaaatatagtgctcatttttttgattaaccacggcgg

SEQ ID NO: 63231 - DNA, 50 bp, synthetic construct
  source 1..50: mol_type = other DNA
aagggccccagcggcccgtaagcgccgatattcacgccgcaaacgcccgg

SEQ ID NO: 63232 - DNA, 50 bp, synthetic construct
  source 1..50: mol_type = other DNA
tttttgttgtccagtgggaggccaggtggccaggcgctggatgtagctga

SEQ ID NO: 63233 - DNA, 50 bp, synthetic construct
  source 1..50: mol_type = other DNA
tcaaccttttggtaggtaattgttgcaacaatacactaccaaggagttga

SEQ ID NO: 63234 - DNA, 50 bp, synthetic construct
  source 1..50: mol_type = other DNA
tattagcattggtgacgttggtttttcacactacatcgttgatgaagata

SEQ ID NO: 63235 - DNA, 50 bp, synthetic construct
  source 1..50: mol_type = other DNA
accggtgtactgtttcacaacactaacaggttgtgctacaatacacccat

SEQ ID NO: 63236 - DNA, 50 bp, synthetic construct
  source 1..50: mol_type = other DNA
ttcatcgtgatctccgatcgttgatgatagccatcgctcatcaagatacc

SEQ ID NO: 63237 - DNA, 50 bp, synthetic construct
  source 1..50: mol_type = other DNA
ttgagctcctcgacggccagaccggccgggctgataatcgaacagcacga

SEQ ID NO: 63238 - DNA, 50 bp, synthetic construct
  source 1..50: mol_type = other DNA
agaatccagtgcagttgctcagtcgtcaggcgggcgggggcacggatcga

SEQ ID NO: 63239 - DNA, 50 bp, synthetic construct
  source 1..50: mol_type = other DNA
cgcagatcgccgtgtccaagcattcctatgctgcgaggcgatgatcatcg

SEQ ID NO: 63240 - DNA, 50 bp, synthetic construct
  source 1..50: mol_type = other DNA
agtcataggtgtagctaaaggtcgcgtcgaccacgcaaacggcgagagct

SEQ ID NO: 63241 - DNA, 50 bp, synthetic construct
  source 1..50: mol_type = other DNA
tcggaggtgatctgggccatcgaactggtgatggcatacaacgatcagcg

SEQ ID NO: 63242 - DNA, 50 bp, synthetic construct
  source 1..50: mol_type = other DNA
agacattacatagaaatacaggttaatacctgtaagattcgaccttgcag

SEQ ID NO: 63243 - DNA, 50 bp, synthetic construct
  source 1..50: mol_type = other DNA
gtgtgagattcacccctaccattcgagactggcaggtggtattctcacac

SEQ ID NO: 63244 - DNA, 50 bp, synthetic construct
  source 1..50: mol_type = other DNA
aaaacaaaaagcccctaccgcgtatttacctatggttgaatttttgattt

SEQ ID NO: 63245 - DNA, 50 bp, synthetic construct
  source 1..50: mol_type = other DNA
cagccactgttttgtttgacacatacagtatattcacaaaagctatgcac

SEQ ID NO: 63246 - DNA, 50 bp, synthetic construct
  source 1..50: mol_type = other DNA
gggtgtctttttgcaactatttacaggcaggacgttgcaacaagacgccg

SEQ ID NO: 63247 - DNA, 50 bp, synthetic construct
  source 1..50: mol_type = other DNA
agtttggacaaaagcgctaccgtctcaacttgttcatcattgtccaaact

SEQ ID NO: 63248 - DNA, 50 bp, synthetic construct
  source 1..50: mol_type = other DNA
cccgttgcttcgttgtagcaacactaggataggaacacaaattattaacc

SEQ ID NO: 63249 - DNA, 50 bp, synthetic construct
  source 1..50: mol_type = other DNA
ttttctttaggtataatatagaaaacttctctcattataccatagaaacc

SEQ ID NO: 63250 - DNA, 50 bp, synthetic construct
  source 1..50: mol_type = other DNA
tgtattctcaaggaccagacaacacacgtggagtgcgtagtgttgctaca

SEQ ID NO: 63251 - DNA, 50 bp, synthetic construct
  source 1..50: mol_type = other DNA
tataaaaaccgcatcattaaccgatatcataagtgatgcggttttttatt

SEQ ID NO: 63252 - DNA, 50 bp, synthetic construct
  source 1..50: mol_type = other DNA
gtaaaactatgaattattcaggaaaaaacctgaataattcatagctctaa

SEQ ID NO: 63253 - DNA, 50 bp, synthetic construct
  source 1..50: mol_type = other DNA
cacgcgagaggtcagatttatgacttttcgttaagctgaccttatggcaa

SEQ ID NO: 63254 - DNA, 50 bp, synthetic construct
  source 1..50: mol_type = other DNA
ccttaatctcaagggctttagctacgctctataagcccttcaaatataaa

SEQ ID NO: 63255 - DNA, 50 bp, synthetic construct
  source 1..50: mol_type = other DNA
gtatctacagaacatgaggagcagataaggagctctgtgaaaagagaaag

SEQ ID NO: 63256 - DNA, 50 bp, synthetic construct
  source 1..50: mol_type = other DNA
aaattctggatgcggtgaattttccgcgttatattccgaatttagaaagt

SEQ ID NO: 63257 - DNA, 50 bp, synthetic construct
  source 1..50: mol_type = other DNA
ggcatcaggaggtgcgctttccccgtcgccttggcagcacagtaggagcg

SEQ ID NO: 63258 - DNA, 50 bp, synthetic construct
  source 1..50: mol_type = other DNA
gtggtcttccaggatatagccctccgcgggtggcttttgtgctggaccac

SEQ ID NO: 63259 - DNA, 50 bp, synthetic construct
  source 1..50: mol_type = other DNA
agcagcggaccgtcagtatggtctttacggcgatatgatgggccgcgtga

SEQ ID NO: 63260 - DNA, 50 bp, synthetic construct
  source 1..50: mol_type = other DNA
atatcaatcatcctttcctggcgcaagcgacaggaaaggacgaatgatcc

SEQ ID NO: 63261 - DNA, 50 bp, synthetic construct
  source 1..50: mol_type = other DNA
tcttgataaatgtcgtaggttaacttcttaaccttatcaatttataacca

SEQ ID NO: 63262 - DNA, 50 bp, synthetic construct
  source 1..50: mol_type = other DNA
tatatatcaatgtaaatatgttattttcaatataaaaacatccatatata

SEQ ID NO: 63263 - DNA, 50 bp, synthetic construct
  source 1..50: mol_type = other DNA
ttttagttttatttgtgatacgcttctgcttatcagtgattttgctaaaa

SEQ ID NO: 63264 - DNA, 50 bp, synthetic construct
  source 1..50: mol_type = other DNA
tgaggagctttgagaaagggggagtgtcatctctttgtacaagctgtgaa

SEQ ID NO: 63265 - DNA, 50 bp, synthetic construct
  source 1..50: mol_type = other DNA
gggcgacgcgggtcatggccgtccgcgggcgggtctcgaccggcgcgccc

SEQ ID NO: 63266 - DNA, 50 bp, synthetic construct
  source 1..50: mol_type = other DNA
agcatctagaatatgctccatctttatcgatagacgcaattgaagatgca

SEQ ID NO: 63267 - DNA, 50 bp, synthetic construct
  source 1..50: mol_type = other DNA
gtgatagatagacttccatcatgccccaataggcgaactccatctcttat

SEQ ID NO: 63268 - DNA, 50 bp, synthetic construct
  source 1..50: mol_type = other DNA
cgcagcaatgaaagaattattgctcacacaataatttattttttcaaagg

SEQ ID NO: 63269 - DNA, 50 bp, synthetic construct
  source 1..50: mol_type = other DNA
agatcgtcgcgggagtcctcgccggccctgctcgaccagcgcaacctcgc

SEQ ID NO: 63270 - DNA, 50 bp, synthetic construct
  source 1..50: mol_type = other DNA
ggtcacggccgcgtctcagccgatccgtcggaaagcttcgctccatgccc

SEQ ID NO: 63271 - DNA, 50 bp, synthetic construct
  source 1..50: mol_type = other DNA
aactatcaggtcgagaattgccgcgcgcggcagcaatcgacatgaaaacg

SEQ ID NO: 63272 - DNA, 50 bp, synthetic construct
  source 1..50: mol_type = other DNA
aagccgaggatgcaccgtcgagcagctgctcgcaaggacagaatcggtgc

SEQ ID NO: 63273 - DNA, 50 bp, synthetic construct
  source 1..50: mol_type = other DNA
gtatgtcagtcaatttgcttgatatttatcaccatgaggagcgtaattac

SEQ ID NO: 63274 - DNA, 50 bp, synthetic construct
  source 1..50: mol_type = other DNA
atcaattggaaaatataaataattttaatgcgtttaatttttccatttcc

SEQ ID NO: 63275 - DNA, 50 bp, synthetic construct
  source 1..50: mol_type = other DNA
attataaaaatcgattatagttttataaaattcggctagctttttatatt

SEQ ID NO: 63276 - DNA, 50 bp, synthetic construct
  source 1..50: mol_type = other DNA
ataggcgatagccaaaactcatattagatgatgttttagcaatcgctgta

SEQ ID NO: 63277 - DNA, 50 bp, synthetic construct
  source 1..50: mol_type = other DNA
acttaacattaagtttccttttaattgcatgagcaaaagtttttttatta

SEQ ID NO: 63278 - DNA, 50 bp, synthetic construct
  source 1..50: mol_type = other DNA
gtagagctattatgataaaaaacttaagtcaattatcgacctaataactg

SEQ ID NO: 63279 - DNA, 50 bp, synthetic construct
  source 1..50: mol_type = other DNA
atgatggttcagttcaaccaataagattatgattttggtcaacgtatcat

SEQ ID NO: 63280 - DNA, 50 bp, synthetic construct
  source 1..50: mol_type = other DNA
tgtttccccgctagcatcgacaatcacctcttaatgctaaattttaaaaa

SEQ ID NO: 63281 - DNA, 50 bp, synthetic construct
  source 1..50: mol_type = other DNA
attcaaacttctgctttactatcactaactagtaaagcgtcatcttgacc

SEQ ID NO: 63282 - DNA, 50 bp, synthetic construct
  source 1..50: mol_type = other DNA
gtcatcatttttttcattttaaaaatttttatgagagatggatttctgaa

SEQ ID NO: 63283 - DNA, 50 bp, synthetic construct
  source 1..50: mol_type = other DNA
ctgctaataactgagaaagaacattttttctttttaattcatattattac

SEQ ID NO: 63284 - DNA, 50 bp, synthetic construct
  source 1..50: mol_type = other DNA
gagttaacagtgaaggtattgccttagtgtgtagcctttaatatagactt

SEQ ID NO: 63285 - DNA, 50 bp, synthetic construct
  source 1..50: mol_type = other DNA
ctgaattatcctctgctgtcattttaacatcacatcttattttaattcat

SEQ ID NO: 63286 - DNA, 50 bp, synthetic construct
  source 1..50: mol_type = other DNA
ttcataattttgcctcctctttaatagtaaagagcaattaaaaggaaact

SEQ ID NO: 63287 - DNA, 50 bp, synthetic construct
  source 1..50: mol_type = other DNA
tatccttattgacatatgaggaagtgcatctgcatctcggaaaaaatata

SEQ ID NO: 63288 - DNA, 50 bp, synthetic construct
  source 1..50: mol_type = other DNA
atgtatcgctttcatcaattcaactcagggaattcttgaaggaaaagttt

SEQ ID NO: 63289 - DNA, 50 bp, synthetic construct
  source 1..50: mol_type = other DNA
tgtcgtcaccttgttggtgtaattagattgacgccaacaaggtgataaca

SEQ ID NO: 63290 - DNA, 50 bp, synthetic construct
  source 1..50: mol_type = other DNA
atacctactctgtgtagtcccttgtacaaggaactacacgcagaccacga

SEQ ID NO: 63291 - DNA, 50 bp, synthetic construct
  source 1..50: mol_type = other DNA
tagcattaacctcaatatccttattaatattgctattgttgtaaatctat

SEQ ID NO: 63292 - DNA, 50 bp, synthetic construct
  source 1..50: mol_type = other DNA
acactgggcgattgccacctgctccccggcgggggcaggtcaggctgtga

SEQ ID NO: 63293 - DNA, 50 bp, synthetic construct
  source 1..50: mol_type = other DNA
gatagtttcttttcccagtgtttcagaaaaagcccggaaatccgggattt

SEQ ID NO: 63294 - DNA, 50 bp, synthetic construct
  source 1..50: mol_type = other DNA
gatgatctggacagcatcgtccgggacgggaggaaacactggtgattgaa

SEQ ID NO: 63295 - DNA, 50 bp, synthetic construct
  source 1..50: mol_type = other DNA
ttacaaaaataaaagtttcaccagatctggtgaaatctttatttaaaaaa

SEQ ID NO: 63296 - DNA, 50 bp, synthetic construct
  source 1..50: mol_type = other DNA
tatttgcaaacactccacatgacatttgagatgtgtagtgtttgcaaata

SEQ ID NO: 63297 - DNA, 50 bp, synthetic construct
  source 1..50: mol_type = other DNA
agttccaactctttaagaccaggaatttctgagttactttttatcgctct

SEQ ID NO: 63298 - DNA, 50 bp, synthetic construct
  source 1..50: mol_type = other DNA
atttattttaattcttgccggatattgatcatttattgcttatattaaat

SEQ ID NO: 63299 - DNA, 50 bp, synthetic construct
  source 1..50: mol_type = other DNA
cctcaagatggcgacatataagcgttatttttaatttcttctattaaaac

SEQ ID NO: 63300 - DNA, 50 bp, synthetic construct
  source 1..50: mol_type = other DNA
cacacttcattagtattcacctataaatcttcaaatacagaaaaaagaga

SEQ ID NO: 63301 - DNA, 50 bp, synthetic construct
  source 1..50: mol_type = other DNA
ttgcaggttagttttctattattatagaacaaaagaaaattactgtgaaa

SEQ ID NO: 63302 - DNA, 50 bp, synthetic construct
  source 1..50: mol_type = other DNA
cctgggcgtacgggatcgtatggtccgccactcggcaccgtccgacctcc

SEQ ID NO: 63303 - DNA, 50 bp, synthetic construct
  source 1..50: mol_type = other DNA
taaaatcctttggagaacgaaggctgggcttcatatcgtaaagatgtttt

SEQ ID NO: 63304 - DNA, 50 bp, synthetic construct
  source 1..50: mol_type = other DNA
attataatcctaactttttataaaaacatatgaaaggttgtaattttaat

SEQ ID NO: 63305 - DNA, 50 bp, synthetic construct
  source 1..50: mol_type = other DNA
atgctgtttttcttgtattacgttatagtcaaatagaaagcgaggtgcaa

SEQ ID NO: 63306 - DNA, 50 bp, synthetic construct
  source 1..50: mol_type = other DNA
ttacttctttatcgcacatcagtaaatgctcatgtacggtaaggaagcaa

SEQ ID NO: 63307 - DNA, 50 bp, synthetic construct
  source 1..50: mol_type = other DNA
tggcacggacgaaatccgccgtgctcacagcgtggatctcgtcctccccc

SEQ ID NO: 63308 - DNA, 50 bp, synthetic construct
  source 1..50: mol_type = other DNA
agcgctcctcggattggcgcaacgcccgcaccgatgacgcaaggaggtcc

SEQ ID NO: 63309 - DNA, 50 bp, synthetic construct
  source 1..50: mol_type = other DNA
tgtattgtactacattgttagcagaccatcaggatatggtgtacctttac

SEQ ID NO: 63310 - DNA, 50 bp, synthetic construct
  source 1..50: mol_type = other DNA
tatccatgctttcttaattcagcgcatgttgacataagaaaacatgaaaa

SEQ ID NO: 63311 - DNA, 50 bp, synthetic construct
  source 1..50: mol_type = other DNA
tgttttacttatataacagttccgttaggtttagattcctaagtaaaaca

SEQ ID NO: 63312 - DNA, 50 bp, synthetic construct
  source 1..50: mol_type = other DNA
ctgccatgattgcaaagtccgcaccagctcatgttttgctggcgataatc

SEQ ID NO: 63313 - DNA, 50 bp, synthetic construct
  source 1..50: mol_type = other DNA
acggaaagtgcaacagaaacataccgggaaatgaaagttgcactttatgc

SEQ ID NO: 63314 - DNA, 50 bp, synthetic construct
  source 1..50: mol_type = other DNA
caacgaccttctggtggaggtaagggtggacctccgtagcagcttctcaa

SEQ ID NO: 63315 - DNA, 50 bp, synthetic construct
  source 1..50: mol_type = other DNA
cttccgggggtttgagaagctgctaccagaaggtcgttgttcaaaccaac

SEQ ID NO: 63316 - DNA, 50 bp, synthetic construct
  source 1..50: mol_type = other DNA
aaaaatgtctaagattggatttatatcaagaaataaagctagcttgttaa

SEQ ID NO: 63317 - DNA, 50 bp, synthetic construct
  source 1..50: mol_type = other DNA
ctcgtcttcataggatggaaatctgagcatctgccttctaagcagacggt

SEQ ID NO: 63318 - DNA, 50 bp, synthetic construct
  source 1..50: mol_type = other DNA
gctttgtccttcaacgcgtactggcgacaaggcgcaggccgcgacgaaca

SEQ ID NO: 63319 - DNA, 50 bp, synthetic construct
  source 1..50: mol_type = other DNA
atttatagcagattaggcgtgtcaattttagagcagattctgccttttac

SEQ ID NO: 63320 - DNA, 50 bp, synthetic construct
  source 1..50: mol_type = other DNA
atattctgttttcaaggtgccgtctagacaaaacagagaaaaagaaaggc

SEQ ID NO: 63321 - DNA, 50 bp, synthetic construct
  source 1..50: mol_type = other DNA
tgatctggatcactggcgatacccatggtccttctccgggtccttgggga

SEQ ID NO: 63322 - DNA, 50 bp, synthetic construct
  source 1..50: mol_type = other DNA
gggagctccaggggaggtgtgtttttcttttttgaagcgggtgaaatctc

SEQ ID NO: 63323 - DNA, 50 bp, synthetic construct
  source 1..50: mol_type = other DNA
cgggaaagccgatggacggtggaatcttccggtttttcatctccgcgcct

SEQ ID NO: 63324 - DNA, 50 bp, synthetic construct
  source 1..50: mol_type = other DNA
cgcagggctcccatatttttctttaaaaagagccattagacggccctttt

SEQ ID NO: 63325 - DNA, 50 bp, synthetic construct
  source 1..50: mol_type = other DNA
gcatcactttccctcctgtgtccaatcggtgacagggcggaaaggctgcc

SEQ ID NO: 63326 - DNA, 50 bp, synthetic construct
  source 1..50: mol_type = other DNA
tctctataatcagccgggtttatttaaatcaaaaatacttgatttaggct

SEQ ID NO: 63327 - DNA, 50 bp, synthetic construct
  source 1..50: mol_type = other DNA
accgagcaggtccacacaccgagcgtcctcggttggcggagtagctcagt

SEQ ID NO: 63328 - DNA, 50 bp, synthetic construct
  source 1..50: mol_type = other DNA
cttcaaagaatgaggtatttgagtgcactttaaaaccgcacaaatgtcag

SEQ ID NO: 63329 - DNA, 50 bp, synthetic construct
  source 1..50: mol_type = other DNA
tttaatgcaaataaaaaaccatatattcactgtttaaaattcacattcct

SEQ ID NO: 63330 - DNA, 50 bp, synthetic construct
  source 1..50: mol_type = other DNA
tttaccttatatgttgctttccacctgtatatcaacatatagggtggact

SEQ ID NO: 63331 - DNA, 50 bp, synthetic construct
  source 1..50: mol_type = other DNA
aggctgacgcgcgtgatcccgcgcgccatcggctgcacgcgcgtcagcgc

SEQ ID NO: 63332 - DNA, 50 bp, synthetic construct
  source 1..50: mol_type = other DNA
gccgcactccgcacgcgcgccagcacgctggcccgcgcccggctgatcgt

SEQ ID NO: 63333 - DNA, 50 bp, synthetic construct
  source 1..50: mol_type = other DNA
cagggataatacgcactttacccaattgaatgaagaaacacttatcggaa

SEQ ID NO: 63334 - DNA, 50 bp, synthetic construct
  source 1..50: mol_type = other DNA
atcctcggcgatgcaattcagagcgggcccacaattggcgcgggatggag

SEQ ID NO: 63335 - DNA, 50 bp, synthetic construct
  source 1..50: mol_type = other DNA
gaagtttaaagattctattctctgttaagataaacgaagctttaaaatcc

SEQ ID NO: 63336 - DNA, 50 bp, synthetic construct
  source 1..50: mol_type = other DNA
gctcgtgccgatcgtggcagacgccggcgtcatcgacatgcgctacgaga

SEQ ID NO: 63337 - DNA, 50 bp, synthetic construct
  source 1..50: mol_type = other DNA
ttttctttattaaatagaaaaagaaagctttaaaaatgaggtcaagaaaa

SEQ ID NO: 63338 - DNA, 50 bp, synthetic construct
  source 1..50: mol_type = other DNA
ctgactctcttgatctttttcattatatagaaataaagaaagagggataa

SEQ ID NO: 63339 - DNA, 50 bp, synthetic construct
  source 1..50: mol_type = other DNA
aatgtttatttaacattcaaatatttataaatatatattatctatatgtt

SEQ ID NO: 63340 - DNA, 50 bp, synthetic construct
  source 1..50: mol_type = other DNA
ctttctctaaaactatttttattatattctaaaaacgattatcgagaagc

SEQ ID NO: 63341 - DNA, 50 bp, synthetic construct
  source 1..50: mol_type = other DNA
tattataaaattacggctgaaataacgcctcagcgtatcgttttatactg

SEQ ID NO: 63342 - DNA, 50 bp, synthetic construct
  source 1..50: mol_type = other DNA
gattaagtgttctccttaattctattcagatagcctgtaacaacttgtca

SEQ ID NO: 63343 - DNA, 50 bp, synthetic construct
  source 1..50: mol_type = other DNA
ggttcaatctttgtcttcccatagtattgtgttgctacaacgagcagata

SEQ ID NO: 63344 - DNA, 50 bp, synthetic construct
  source 1..50: mol_type = other DNA
ttctaaagaaaagcccgaggagggcaagctactagagccattcaatagta

SEQ ID NO: 63345 - DNA, 50 bp, synthetic construct
  source 1..50: mol_type = other DNA
atacttccttatgagcacctaccattaggtagtgtctcataaggaagtaa

SEQ ID NO: 63346 - DNA, 50 bp, synthetic construct
  source 1..50: mol_type = other DNA
tgatcgtgagaaaagcccgaaagccggttcaccgcctgcaccgtggtcca

SEQ ID NO: 63347 - DNA, 50 bp, synthetic construct
  source 1..50: mol_type = other DNA
gtgggtctttttttgtgtccatttttatttggtgtcaaaaaaatagacat

SEQ ID NO: 63348 - DNA, 50 bp, synthetic construct
  source 1..50: mol_type = other DNA
ttcggctttcgccaccgcccggtacttcggaggcgtcggcgacgatcgcc

SEQ ID NO: 63349 - DNA, 50 bp, synthetic construct
  source 1..50: mol_type = other DNA
gtggtggaatcgtcgagtcgaagaagcctgcgactttacggatcgtggcc

SEQ ID NO: 63350 - DNA, 50 bp, synthetic construct
  source 1..50: mol_type = other DNA
attataaaagtccagcgcaatttaaagagatagccctgaactcaaacaaa

SEQ ID NO: 63351 - DNA, 50 bp, synthetic construct
  source 1..50: mol_type = other DNA
tttcagtaatctttttcaaagaatcatgattttgcgaaagaaatttgaca

SEQ ID NO: 63352 - DNA, 50 bp, synthetic construct
  source 1..50: mol_type = other DNA
gcaaaggttcagcttttgcgccgtcaatggcgcgaagccgaacccggtgt

SEQ ID NO: 63353 - DNA, 50 bp, synthetic construct
  source 1..50: mol_type = other DNA
tgttaatgggaccaccggggagtccggacgggtcgggctttagtcgggca

SEQ ID NO: 63354 - DNA, 50 bp, synthetic construct
  source 1..50: mol_type = other DNA
tataaatatcattcactcatgataccataccacaaataatgatatttttt

SEQ ID NO: 63355 - DNA, 50 bp, synthetic construct
  source 1..50: mol_type = other DNA
ttagtgcaagttacattaccaaccaagcaacgtaatgtaacccacaacta

SEQ ID NO: 63356 - DNA, 50 bp, synthetic construct
  source 1..50: mol_type = other DNA
ggggaaaaatcaacatccccaagatatcgtccggttttgggtacgttatt

SEQ ID NO: 63357 - DNA, 50 bp, synthetic construct
  source 1..50: mol_type = other DNA
ttcttaatatcatcatttgcattatatcctgcatatgaatttaaggaagg

SEQ ID NO: 63358 - DNA, 50 bp, synthetic construct
  source 1..50: mol_type = other DNA
agtcatgaccgccggactcgtgctcgatgacgagaaggactccgatgatc

SEQ ID NO: 63359 - DNA, 50 bp, synthetic construct
  source 1..50: mol_type = other DNA
tttttaaaatagaaatttggtacaaggaggaaaaatgaatataagaaaaa

SEQ ID NO: 63360 - DNA, 50 bp, synthetic construct
  source 1..50: mol_type = other DNA
ttttacaatatcaacccaatttagaatcagagtagccgcttattgtcgag

SEQ ID NO: 63361 - DNA, 50 bp, synthetic construct
  source 1..50: mol_type = other DNA
cgccgacgccgtggtggtcgtcgaggccgctcgcctgcgcggcgtcggca

SEQ ID NO: 63362 - DNA, 50 bp, synthetic construct
  source 1..50: mol_type = other DNA
cagtgtgtagcctttttatatttgtacaacactaccaaaaaacaacaccc

SEQ ID NO: 63363 - DNA, 50 bp, synthetic construct
  source 1..50: mol_type = other DNA
cctgtgctgccgggttatcaaaatgctggggaataacccagaagcagaca

SEQ ID NO: 63364 - DNA, 50 bp, synthetic construct
  source 1..50: mol_type = other DNA
aggaaaaaagaacggaaaaagggctgacggcaaccccgttttctattcga

SEQ ID NO: 63365 - DNA, 50 bp, synthetic construct
  source 1..50: mol_type = other DNA
gggccatcataaaaaatgtttacactgatagaggcgttttttgtgtgtaa

SEQ ID NO: 63366 - DNA, 50 bp, synthetic construct
  source 1..50: mol_type = other DNA
cgaagatgtcgccaaaccatgcctcgagaaccgccgccgcgagatcggcc

SEQ ID NO: 63367 - DNA, 50 bp, synthetic construct
  source 1..50: mol_type = other DNA
atcgcatctgccgacggactgagccggctcagccgttcggcccgcgcggt

SEQ ID NO: 63368 - DNA, 50 bp, synthetic construct
  source 1..50: mol_type = other DNA
ccatgctataatacatttgctcggaatgaagcagatgtaggacgcggcat

SEQ ID NO: 63369 - DNA, 50 bp, synthetic construct
  source 1..50: mol_type = other DNA
ctggcagcagggcataaaaatgcccggagctgtctcagaaatgcctcctc

SEQ ID NO: 63370 - DNA, 50 bp, synthetic construct
  source 1..50: mol_type = other DNA
aaccgaaagcgtgataagttaaaaataatggaagtacgcatattttggta

SEQ ID NO: 63371 - DNA, 50 bp, synthetic construct
  source 1..50: mol_type = other DNA
tgacacctgctaaagtatgcttttatgactggtgggttttgggagtatca

SEQ ID NO: 63372 - DNA, 50 bp, synthetic construct
  source 1..50: mol_type = other DNA
tgacgattaattagctcatatattgagatgttgtggctaattaatttatc

SEQ ID NO: 63373 - DNA, 50 bp, synthetic construct
  source 1..50: mol_type = other DNA
tttcctttgtgtaatgttcaccatcgctaatgagcaagcttcaaaggtgc

SEQ ID NO: 63374 - DNA, 50 bp, synthetic construct
  source 1..50: mol_type = other DNA
gtatgataaatttgtttgtttacaatgctatacaaacaaataaatcatgc

SEQ ID NO: 63375 - DNA, 50 bp, synthetic construct
  source 1..50: mol_type = other DNA
ggctggtcactgattagaaggctgatcagtcatctgtacagcagctttta

SEQ ID NO: 63376 - DNA, 50 bp, synthetic construct
  source 1..50: mol_type = other DNA
agtttggacaatgatgagcatgttgagacggtagcattattgtccaaact

SEQ ID NO: 63377 - DNA, 50 bp, synthetic construct
  source 1..50: mol_type = other DNA
attggctcgaatcgcaggcgagtttcgcatctgcttggattctacggcac

SEQ ID NO: 63378 - DNA, 50 bp, synthetic construct
  source 1..50: mol_type = other DNA
ttaataatttgtgttcctatcctatgcatagcgttgatacaaagagtgaa

SEQ ID NO: 63379 - DNA, 50 bp, synthetic construct
  source 1..50: mol_type = other DNA
aggctattcaattaattgaaaattatcaggtcgaattagttggtctgata

SEQ ID NO: 63380 - DNA, 50 bp, synthetic construct
  source 1..50: mol_type = other DNA
ctgatttgcctaataatactatgcaagaccagcgttcttcatcaggtcag

SEQ ID NO: 63381 - DNA, 50 bp, synthetic construct
  source 1..50: mol_type = other DNA
tttatacaatattaatctgtatttgaaaataaagagcaatgttgtacatc

SEQ ID NO: 63382 - DNA, 50 bp, synthetic construct
  source 1..50: mol_type = other DNA
acgctatagtctccacatgatgcgttgggaacataattttttatcctcgt

SEQ ID NO: 63383 - DNA, 50 bp, synthetic construct
  source 1..50: mol_type = other DNA
tcttgaattttcgtgtaacaacaagtcgaatcactggcgagaattcaatc

SEQ ID NO: 63384 - DNA, 50 bp, synthetic construct
  source 1..50: mol_type = other DNA
tttagtacctcgttttctctcgttggaagaagaagaaacgagatactaaa

SEQ ID NO: 63385 - DNA, 50 bp, synthetic construct
  source 1..50: mol_type = other DNA
attcacattttctcctctcctcagaattgattatcgctagccatgtgtaa

SEQ ID NO: 63386 - DNA, 50 bp, synthetic construct
  source 1..50: mol_type = other DNA
tataactaacccgtgtttacaatacctgttgtaaatgattttttattaaa

SEQ ID NO: 63387 - DNA, 50 bp, synthetic construct
  source 1..50: mol_type = other DNA
aatatactatgaattgttacaaaaaattttagaaaaaaaggtaggatata

SEQ ID NO: 63388 - DNA, 50 bp, synthetic construct
  source 1..50: mol_type = other DNA
acttatttacgtatcatgtcacaattatgttatcgaattatgtcaaaagt

SEQ ID NO: 63389 - DNA, 50 bp, synthetic construct
  source 1..50: mol_type = other DNA
tacggatgtaccccttttgtatttgaagccgcaaaagccgtagctaaagc

SEQ ID NO: 63390 - DNA, 50 bp, synthetic construct
  source 1..50: mol_type = other DNA
cagaaaaatatgagtaaatagtgtaatcacttaataaacagtattcttcg

SEQ ID NO: 63391 - DNA, 50 bp, synthetic construct
  source 1..50: mol_type = other DNA
aaaggagaaaaaatagcatgacagaatgaagaaaatcttttattcccgtt

SEQ ID NO: 63392 - DNA, 50 bp, synthetic construct
  source 1..50: mol_type = other DNA
gagttttacacctaattgggtataaaaatccggaaatgcttgtaaaatcg

SEQ ID NO: 63393 - DNA, 50 bp, synthetic construct
  source 1..50: mol_type = other DNA
ggatcacgccacttgttgcgcacacgctggcgctacgaggggcaggagca

SEQ ID NO: 63394 - DNA, 50 bp, synthetic construct
  source 1..50: mol_type = other DNA
ccctcggtcaggctgggtgatttgctggaagcggccagcctgacacagga

SEQ ID NO: 63395 - DNA, 50 bp, synthetic construct
  source 1..50: mol_type = other DNA
ctccttattctaatccttaaattaattcttttattaattattttattcat

SEQ ID NO: 63396 - DNA, 50 bp, synthetic construct
  source 1..50: mol_type = other DNA
catcattccatttatatatttcacttaaaactaaataaaattgaataata

SEQ ID NO: 63397 - DNA, 50 bp, synthetic construct
  source 1..50: mol_type = other DNA
tggttctccctcccttctttaaatatatttaaagcctttagaatgaagat

SEQ ID NO: 63398 - DNA, 50 bp, synthetic construct
  source 1..50: mol_type = other DNA
tattatttatagctagggatttattatataatattattgtggaattaata

SEQ ID NO: 63399 - DNA, 50 bp, synthetic construct
  source 1..50: mol_type = other DNA
attcatcccgcgagtagtcttcaataattagaactacttcgggtagctat

SEQ ID NO: 63400 - DNA, 50 bp, synthetic construct
  source 1..50: mol_type = other DNA
cggcaagctgttgggtggacacctcgcggcgtttgatgagcaggatgcgt

SEQ ID NO: 63401 - DNA, 50 bp, synthetic construct
  source 1..50: mol_type = other DNA
attgcgtgagcctaccggggcatccggtcgcccttgtaggcgcgctcgaa

SEQ ID NO: 63402 - DNA, 50 bp, synthetic construct
  source 1..50: mol_type = other DNA
gagaaaccatactgtactgctattataattcgctgtctgaatacggcctg

SEQ ID NO: 63403 - DNA, 50 bp, synthetic construct
  source 1..50: mol_type = other DNA
agcatcgtcgcgacctgctcgatcaggaacaggacgatcccgccgaatag

SEQ ID NO: 63404 - DNA, 50 bp, synthetic construct
  source 1..50: mol_type = other DNA
gaaagaagcatttttggtacccccgacgccgtttcaaattcagatacacc

SEQ ID NO: 63405 - DNA, 50 bp, synthetic construct
  source 1..50: mol_type = other DNA
gtttgagtacggcttctatggtggagacactattcaagtaaggccaccct

SEQ ID NO: 63406 - DNA, 50 bp, synthetic construct
  source 1..50: mol_type = other DNA
atggttgtaaagatagcccatcgaattccaatgtcaatttttacatgcac

SEQ ID NO: 63407 - DNA, 50 bp, synthetic construct
  source 1..50: mol_type = other DNA
ttttatctttctacagtgtagattatattcttccaattgataatgaaaag

SEQ ID NO: 63408 - DNA, 50 bp, synthetic construct
  source 1..50: mol_type = other DNA
aattttttaactgagttatctagcttcaaatataacttagttatattgta

SEQ ID NO: 63409 - DNA, 50 bp, synthetic construct
  source 1..50: mol_type = other DNA
cctttttgtcctttaatctttctttttaaacgattttaaaatcaaaagac

SEQ ID NO: 63410 - DNA, 50 bp, synthetic construct
  source 1..50: mol_type = other DNA
ataaagacagaatattctttgaaaatttttaaagatttttcttatattct

SEQ ID NO: 63411 - DNA, 50 bp, synthetic construct
  source 1..50: mol_type = other DNA
gtagatttaattaaatcttaatctgttaaactagatataatgatataggt

SEQ ID NO: 63412 - DNA, 50 bp, synthetic construct
  source 1..50: mol_type = other DNA
tgaacttctcctgaaatatccggaaacatttttaagacaggagaagtaat

SEQ ID NO: 63413 - DNA, 50 bp, synthetic construct
  source 1..50: mol_type = other DNA
ctcttcgcttatttcccctcttgcatacagcagatgaaatatcagagaaa

SEQ ID NO: 63414 - DNA, 50 bp, synthetic construct
  source 1..50: mol_type = other DNA
gcaaccggggagaccgagctcgacccccgccgctgaatcggcccggtcgg

SEQ ID NO: 63415 - DNA, 50 bp, synthetic construct
  source 1..50: mol_type = other DNA
atttagttgcaaatgttttaaaataaagcataaaacatttgtgattaaat

SEQ ID NO: 63416 - DNA, 50 bp, synthetic construct
  source 1..50: mol_type = other DNA
cgaccagcagagcgaccacgtcgccgttgacctaccggaactgctcttcg

SEQ ID NO: 63417 - DNA, 50 bp, synthetic construct
  source 1..50: mol_type = other DNA
aataagttatattaatgtgtagaattttctacacatctatttggaatcat

SEQ ID NO: 63418 - DNA, 50 bp, synthetic construct
  source 1..50: mol_type = other DNA
caaattttatgaaatcaagtgaattaattgacttgattctcatagcttga

SEQ ID NO: 63419 - DNA, 50 bp, synthetic construct
  source 1..50: mol_type = other DNA
attcctacacgtcattggaaaacaccggtcaaacaatgaatgccaggcaa

SEQ ID NO: 63420 - DNA, 50 bp, synthetic construct
  source 1..50: mol_type = other DNA
attatcacttttctccggtcttgtacccaacaccgaccaaatatcgaaac

SEQ ID NO: 63421 - DNA, 50 bp, synthetic construct
  source 1..50: mol_type = other DNA
ggttcgacatttcttcggtcttgggtacaaagccggaaaaaggtgataac

SEQ ID NO: 63422 - DNA, 50 bp, synthetic construct
  source 1..50: mol_type = other DNA
ttgcagacatacttatgacgtttgcgcaagatcattctgtatgtcggccg

SEQ ID NO: 63423 - DNA, 50 bp, synthetic construct
  source 1..50: mol_type = other DNA
gattttaggtttgattttatctatgaataaaccatattgccgataaaata

SEQ ID NO: 63424 - DNA, 50 bp, synthetic construct
  source 1..50: mol_type = other DNA
ttttcttttgcttgtgattataataaattataaagtatggcaaaatcaaa

SEQ ID NO: 63425 - DNA, 50 bp, synthetic construct
  source 1..50: mol_type = other DNA
attattcgtgtactaactttacagttatgtatagttagtacaacaataat

SEQ ID NO: 63426 - DNA, 50 bp, synthetic construct
  source 1..50: mol_type = other DNA
atcaaaatgtcccggccttcgctgatgaacgatggcgcggactacgcgaa

SEQ ID NO: 63427 - DNA, 50 bp, synthetic construct
  source 1..50: mol_type = other DNA
aatgtatccaatacttgacacaagggcttgagatataatagggatacaga

SEQ ID NO: 63428 - DNA, 50 bp, synthetic construct
  source 1..50: mol_type = other DNA
tgcttcaattaattcaccaccatatctattgtttcgagttgatttaagtg

SEQ ID NO: 63429 - DNA, 50 bp, synthetic construct
  source 1..50: mol_type = other DNA
tttagtttcttaaaaacatctttgcgtaaagatgttattttatataatat

SEQ ID NO: 63430 - DNA, 50 bp, synthetic construct
  source 1..50: mol_type = other DNA
actcccatgcaattgattatcatttaaattaaggtcaattacgccaaaaa

SEQ ID NO: 63431 - DNA, 50 bp, synthetic construct
  source 1..50: mol_type = other DNA
cattgtatattcgggtgagtacccaagaaaataatttttaataacttatt

SEQ ID NO: 63432 - DNA, 50 bp, synthetic construct
  source 1..50: mol_type = other DNA
agggaggtccttatcataaatagggaagtaattatgatgataacatatgg

SEQ ID NO: 63433 - DNA, 50 bp, synthetic construct
  source 1..50: mol_type = other DNA
agaggtcataagtgtactttccgtaaacgaaacgagatgaaatattcttt

SEQ ID NO: 63434 - DNA, 50 bp, synthetic construct
  source 1..50: mol_type = other DNA
ccatcgacacatcgcgtcaccaattcccccaagggtccatggagacctaa

SEQ ID NO: 63435 - DNA, 50 bp, synthetic construct
  source 1..50: mol_type = other DNA
cactaaacttccgtaaagcattacccgtaaagatgctaacgggtttagtg

SEQ ID NO: 63436 - DNA, 50 bp, synthetic construct
  source 1..50: mol_type = other DNA
ctatttatattattaaagcatgtgatggaatcaattaatagaaatattag

SEQ ID NO: 63437 - DNA, 50 bp, synthetic construct
  source 1..50: mol_type = other DNA
aggagaactccgtagaagaaaaagatgattttcgctccttttctaatcct

SEQ ID NO: 63438 - DNA, 50 bp, synthetic construct
  source 1..50: mol_type = other DNA
tttttcaatgacatagctcctttcattaagttagagacatagttgaaaat

SEQ ID NO: 63439 - DNA, 50 bp, synthetic construct
  source 1..50: mol_type = other DNA
aactttaatcaggccagttacgggaaaaggtgataattttgattagagca

SEQ ID NO: 63440 - DNA, 50 bp, synthetic construct
  source 1..50: mol_type = other DNA
tagtgtcttttaacatactaaagccagctttgttgtgcaataagacactg

SEQ ID NO: 63441 - DNA, 50 bp, synthetic construct
  source 1..50: mol_type = other DNA
gcaaggagctccaatgccgagtcaaacgcatcgtcaccctgggcccttgc

SEQ ID NO: 63442 - DNA, 50 bp, synthetic construct
  source 1..50: mol_type = other DNA
caaccagggccgcctggagccgggccgcatcgctcaggctgccgtggctg

SEQ ID NO: 63443 - DNA, 50 bp, synthetic construct
  source 1..50: mol_type = other DNA
gatctcgtgagcggcacgcatccctggttcgacgtgccaataacgtaaag

SEQ ID NO: 63444 - DNA, 50 bp, synthetic construct
  source 1..50: mol_type = other DNA
acatcatggctaattttatgtttaattaaacaaaaattatatcccaccac

SEQ ID NO: 63445 - DNA, 50 bp, synthetic construct
  source 1..50: mol_type = other DNA
cgagatgacgagacacacgtcgagacatcgaaacggttgcggttctatct

SEQ ID NO: 63446 - DNA, 50 bp, synthetic construct
  source 1..50: mol_type = other DNA
agcacgagatatgttcattgaagataaattaaatgaatatgaaaattgct

SEQ ID NO: 63447 - DNA, 50 bp, synthetic construct
  source 1..50: mol_type = other DNA
tttttcgttgtagcaacactacacacgtgcgatgttttctttatttgtac

SEQ ID NO: 63448 - DNA, 50 bp, synthetic construct
  source 1..50: mol_type = other DNA
agcactggaaacactgttcagtgagtaccccttaaagtgtttagctcgtt

SEQ ID NO: 63449 - DNA, 50 bp, synthetic construct
  source 1..50: mol_type = other DNA
agctactttatttgttgttatcatagatgagtgttttttctatcttagca

SEQ ID NO: 63450 - DNA, 50 bp, synthetic construct
  source 1..50: mol_type = other DNA
cctatactagtaccaacacatattgactattgtgttgatacaacgagcag

SEQ ID NO: 63451 - DNA, 50 bp, synthetic construct
  source 1..50: mol_type = other DNA
gctgaatttgctacgatcatcgtcaaaacgattgtcgactgaacagctta

SEQ ID NO: 63452 - DNA, 50 bp, synthetic construct
  source 1..50: mol_type = other DNA
attgtattctcaaggaacagactacacatcacgtggagtgcgtagtgttg

SEQ ID NO: 63453 - DNA, 50 bp, synthetic construct
  source 1..50: mol_type = other DNA
cgttaataacatctcctccaattgttgaagtaaaggcagcgttaactacc

SEQ ID NO: 63454 - DNA, 50 bp, synthetic construct
  source 1..50: mol_type = other DNA
cattgatacaatttgattggttacacgtaaccaatcacacaattacaaaa

SEQ ID NO: 63455 - DNA, 50 bp, synthetic construct
  source 1..50: mol_type = other DNA
atctcatttcgttccataatataggtgcatagcgttgatacaaagagtga

SEQ ID NO: 63456 - DNA, 50 bp, synthetic construct
  source 1..50: mol_type = other DNA
accagaccggcgatattcgctcgtgcctacgtgatgaaagcaggtctggt

SEQ ID NO: 63457 - DNA, 50 bp, synthetic construct
  source 1..50: mol_type = other DNA
agcagggaaatttttgattgctttatcaagtgagatgtttatttccttaa

SEQ ID NO: 63458 - DNA, 50 bp, synthetic construct
  source 1..50: mol_type = other DNA
tttttgagtgaattttgcacttccattccgttgagaacaagatagaaaac

SEQ ID NO: 63459 - DNA, 50 bp, synthetic construct
  source 1..50: mol_type = other DNA
gtgtcatttttctgccacgataaccgctagacggagcaaaatgttatgaa

SEQ ID NO: 63460 - DNA, 50 bp, synthetic construct
  source 1..50: mol_type = other DNA
gactgcaaccgaaatgggagaaaatattagtgcagtggttgaaggcaggg

SEQ ID NO: 63461 - DNA, 50 bp, synthetic construct
  source 1..50: mol_type = other DNA
tggcttgattcgacgtgggagaaaaatgaacaaatattggtatcaagcat

SEQ ID NO: 63462 - DNA, 50 bp, synthetic construct
  source 1..50: mol_type = other DNA
tgattctcatttaaagatgaacttataaggactagcttatgaatgaacga

SEQ ID NO: 63463 - DNA, 50 bp, synthetic construct
  source 1..50: mol_type = other DNA
ggtttggacaatgatgagcacgttgagacggtagcgttattgtccaaact

SEQ ID NO: 63464 - DNA, 50 bp, synthetic construct
  source 1..50: mol_type = other DNA
catataagtataaaaaatcgcatcatgatgcggtttttcagccgcttctt

SEQ ID NO: 63465 - DNA, 50 bp, synthetic construct
  source 1..50: mol_type = other DNA
tttgtgtttataggaaaccgcatcatgatgcggttttttcagccgcttca

SEQ ID NO: 63466 - DNA, 50 bp, synthetic construct
  source 1..50: mol_type = other DNA
ctgaattgtaattactttcttcactaatgatgtcttttctgctttttctt

SEQ ID NO: 63467 - DNA, 50 bp, synthetic construct
  source 1..50: mol_type = other DNA
gctctagataatgaagcaaagaaaactttcttcactaatatcgcccctct

SEQ ID NO: 63468 - DNA, 50 bp, synthetic construct
  source 1..50: mol_type = other DNA
tttcccaatccttacagtgcccagttctgggcaccacttccggtcaaaaa

SEQ ID NO: 63469 - DNA, 50 bp, synthetic construct
  source 1..50: mol_type = other DNA
ccccttttgtatttggagggcttagataaatgttcccggaacaaaagaaa

SEQ ID NO: 63470 - DNA, 50 bp, synthetic construct
  source 1..50: mol_type = other DNA
tttccaaacaaaaacgcccctaccgttttaggcgctctcctgaatgcgca

SEQ ID NO: 63471 - DNA, 50 bp, synthetic construct
  source 1..50: mol_type = other DNA
aagcggtgagctcacttggtgattttgtgcaactcctgagcttgccgctt

SEQ ID NO: 63472 - DNA, 50 bp, synthetic construct
  source 1..50: mol_type = other DNA
gatagatttttttgtgtttgggtaattccctgaactttcgactctgaata

SEQ ID NO: 63473 - DNA, 50 bp, synthetic construct
  source 1..50: mol_type = other DNA
gcattttctgaatttttccaattattactttcgccatatatcgatgcatt

SEQ ID NO: 63474 - DNA, 50 bp, synthetic construct
  source 1..50: mol_type = other DNA
tcatatctttaactaagggaaagcggtgtttcccaaacaaaaagatatta

SEQ ID NO: 63475 - DNA, 50 bp, synthetic construct
  source 1..50: mol_type = other DNA
atagatttggtcaatccttatttacctaaattcttatttgttaattttaa

SEQ ID NO: 63476 - DNA, 50 bp, synthetic construct
  source 1..50: mol_type = other DNA
tccgaaaaactccaaaaaagctgggatgagcgggaatgattctcacttta

SEQ ID NO: 63477 - DNA, 50 bp, synthetic construct
  source 1..50: mol_type = other DNA
cgctatgacctgacggcttcccttttcgcctctgccgtcgggttttctcg

SEQ ID NO: 63478 - DNA, 50 bp, synthetic construct
  source 1..50: mol_type = other DNA
cgttcaccgcgatgacgtataccaaaaaaccaacgtcaccaatgctaaca

SEQ ID NO: 63479 - DNA, 50 bp, synthetic construct
  source 1..50: mol_type = other DNA
tatcgtcaatatcttttgttaggatttgtcacgtcaggatattgatattg

SEQ ID NO: 63480 - DNA, 50 bp, synthetic construct
  source 1..50: mol_type = other DNA
atacttccttatgagcacctaccattaggtagttcctcataaggaagtaa

SEQ ID NO: 63481 - DNA, 50 bp, synthetic construct
  source 1..50: mol_type = other DNA
tttggtatctcgtttcttctccctccaacgagaggaaacgaggtactaaa

SEQ ID NO: 63482 - DNA, 50 bp, synthetic construct
  source 1..50: mol_type = other DNA
ctttcgtttccgaatgtcggccataaaaggatctctatcggaaaccgaaa

SEQ ID NO: 63483 - DNA, 50 bp, synthetic construct
  source 1..50: mol_type = other DNA
cacttatgtgccgggatttatccagtcgatgaatgcccgctttctgaaag

SEQ ID NO: 63484 - DNA, 50 bp, synthetic construct
  source 1..50: mol_type = other DNA
ccggctcacgtgcacccacaccagtcgaggtcagggtgcgcgtcgatagc

SEQ ID NO: 63485 - DNA, 50 bp, synthetic construct
  source 1..50: mol_type = other DNA
ccaccccttctgggcaaagaatgtcacgctacatccgccagatggggtcg

SEQ ID NO: 63486 - DNA, 50 bp, synthetic construct
  source 1..50: mol_type = other DNA
tgtctttaaaaaaatatcattatttaagtgaatgatatttttaactcact

SEQ ID NO: 63487 - DNA, 50 bp, synthetic construct
  source 1..50: mol_type = other DNA
tataaaaattaatttgaataaattatgatatattcgaaaataaccgtatc

SEQ ID NO: 63488 - DNA, 50 bp, synthetic construct
  source 1..50: mol_type = other DNA
aatacctttatgaagcggctgaaaaattaccacttatagatgaaaaactc

SEQ ID NO: 63489 - DNA, 50 bp, synthetic construct
  source 1..50: mol_type = other DNA
gattggatttatatcattagggtgtcccttggctgcccgaaaaatcaata

SEQ ID NO: 63490 - DNA, 50 bp, synthetic construct
  source 1..50: mol_type = other DNA
acgagctaaaacagttaaggggtacaattcccaccgctttttaaactgga

SEQ ID NO: 63491 - DNA, 50 bp, synthetic construct
  source 1..50: mol_type = other DNA
aggcgagtatttttttcttcaacttaaggtttataaaagcatactttagc

SEQ ID NO: 63492 - DNA, 50 bp, synthetic construct
  source 1..50: mol_type = other DNA
gctactcatagcgaaaacataaaagatttggtgttggaaaagaacaaagt

SEQ ID NO: 63493 - DNA, 50 bp, synthetic construct
  source 1..50: mol_type = other DNA
aataatctcccgatacgccaagcagctgtcaaccgtattgtaaggagctt

SEQ ID NO: 63494 - DNA, 50 bp, synthetic construct
  source 1..50: mol_type = other DNA
tccagcttgttcttcgtggtgttgataacatttgataaaaacaaagtgat

SEQ ID NO: 63495 - DNA, 50 bp, synthetic construct
  source 1..50: mol_type = other DNA
tgtattcttagtattagctttcatagcatggctgaaataactataataca

SEQ ID NO: 63496 - DNA, 50 bp, synthetic construct
  source 1..50: mol_type = other DNA
agttgaagttacaggaattaagatgatgaatgattactgtgctttcagca

SEQ ID NO: 63497 - DNA, 50 bp, synthetic construct
  source 1..50: mol_type = other DNA
tcttcggcattgttaacctccttgtacaaagaaacggtattcagcgaaaa

SEQ ID NO: 63498 - DNA, 50 bp, synthetic construct
  source 1..50: mol_type = other DNA
actgtcattttcttcataaacatcagtagagatatgccgaaagtatcata

SEQ ID NO: 63499 - DNA, 50 bp, synthetic construct
  source 1..50: mol_type = other DNA
agttcaaactacgctgcgttaggcgggccgaatgcaattttgtctgcacc

SEQ ID NO: 63500 - DNA, 50 bp, synthetic construct
  source 1..50: mol_type = other DNA
gtaaaaaatatcataaaataggtttcaagctatgaaaagtgcaattttat

SEQ ID NO: 63501 - DNA, 50 bp, synthetic construct
  source 1..50: mol_type = other DNA
atgattgccttagatgtgtagaaaaatttctacacattaaaataagtcat

SEQ ID NO: 63502 - DNA, 50 bp, synthetic construct
  source 1..50: mol_type = other DNA
ggcacatcaaaaaaatacagggttaataccccggattctctgacgccacc

SEQ ID NO: 63503 - DNA, 50 bp, synthetic construct
  source 1..50: mol_type = other DNA
ccgcatggataaggactcgtcaagttctcgatgacaaggtatccacgccc

SEQ ID NO: 63504 - DNA, 50 bp, synthetic construct
  source 1..50: mol_type = other DNA
gtcatcaagtggaaaatataaataatttttgataaaaagtactttcagac

SEQ ID NO: 63505 - DNA, 50 bp, synthetic construct
  source 1..50: mol_type = other DNA
ttgtcgtcaccttgttggtgtaattatgctaacttccaaggtgacaaaca

SEQ ID NO: 63506 - DNA, 50 bp, synthetic construct
  source 1..50: mol_type = other DNA
tttagtacctcgttttctctcgttggaagaagaataaacgagataccaaa

SEQ ID NO: 63507 - DNA, 50 bp, synthetic construct
  source 1..50: mol_type = other DNA
tggcggcgggcctcgtgtgggtgtcatctcccactatgggcacggcactc

SEQ ID NO: 63508 - DNA, 50 bp, synthetic construct
  source 1..50: mol_type = other DNA
agaagaggaatctaaaccaaagcctaaaccatttttttgcttcctcttcg

SEQ ID NO: 63509 - DNA, 50 bp, synthetic construct
  source 1..50: mol_type = other DNA
ccttgccaaacactcggcatccagacctggataccgagactttgacaaag

SEQ ID NO: 63510 - DNA, 50 bp, synthetic construct
  source 1..50: mol_type = other DNA
atagttatgctttttgtaagctacatgtgacttgctaagtgtgttcacga

SEQ ID NO: 63511 - DNA, 50 bp, synthetic construct
  source 1..50: mol_type = other DNA
ggtatccctcgggtgcccgaaggcgctacatcgagcagtcgaagaacatg

SEQ ID NO: 63512 - DNA, 50 bp, synthetic construct
  source 1..50: mol_type = other DNA
accctgatagagatatgaagcaatctattccttgatatatctggcatata

SEQ ID NO: 63513 - DNA, 50 bp, synthetic construct
  source 1..50: mol_type = other DNA
atgttatgcggctcatatgaagatttatctacaccgaagccatactgaag

SEQ ID NO: 63514 - DNA, 50 bp, synthetic construct
  source 1..50: mol_type = other DNA
gcataataggctgtcaaataggtctgtacccattttatcattttttagga

SEQ ID NO: 63515 - DNA, 50 bp, synthetic construct
  source 1..50: mol_type = other DNA
ataaacaaggttcaggtaacagctgatgtcttttcttgtacctattttat

SEQ ID NO: 63516 - DNA, 50 bp, synthetic construct
  source 1..50: mol_type = other DNA
caacacggtatgttgacactacacaccgtatgcgggattatatcccgcta

SEQ ID NO: 63517 - DNA, 50 bp, synthetic construct
  source 1..50: mol_type = other DNA
ctaccaaagttattatctgagcaaaactcctataatattaagattttaag

SEQ ID NO: 63518 - DNA, 50 bp, synthetic construct
  source 1..50: mol_type = other DNA
gatgctaacattgcaaaacgttgttcacaagtattttcaatatgacgttc

SEQ ID NO: 63519 - DNA, 50 bp, synthetic construct
  source 1..50: mol_type = other DNA
cacgctgtgctcttttgttgtagttaactacatcaaatgaatacagttag

SEQ ID NO: 63520 - DNA, 50 bp, synthetic construct
  source 1..50: mol_type = other DNA
tagaagcccgatgacggggcgatatttcctcctccgtcagatgtcttgtg

SEQ ID NO: 63521 - DNA, 50 bp, synthetic construct
  source 1..50: mol_type = other DNA
tcgccataaggtcagtttaacgaaaagtcataaaccagaccttcaacggg

SEQ ID NO: 63522 - DNA, 50 bp, synthetic construct
  source 1..50: mol_type = other DNA
tgtataagttttggtattatgatagaaatcatgaagcaatcattgataca

SEQ ID NO: 63523 - DNA, 50 bp, synthetic construct
  source 1..50: mol_type = other DNA
ttctaatatactaagttttgtatcaaaaaacaaaaggagaggtatacctt

SEQ ID NO: 63524 - DNA, 50 bp, synthetic construct
  source 1..50: mol_type = other DNA
tgtgtatactaacttaaaaccacggtgaactttttaccaagaaatatagt

SEQ ID NO: 63525 - DNA, 50 bp, synthetic construct
  source 1..50: mol_type = other DNA
cgttgtcatcatgttggtgtaaacctaattacaccaacaagatgacgaca

SEQ ID NO: 63526 - DNA, 50 bp, synthetic construct
  source 1..50: mol_type = other DNA
gcggcccacttgttttacacgtctcgaagcatgtaaaacaagtggctact

SEQ ID NO: 63527 - DNA, 50 bp, synthetic construct
  source 1..50: mol_type = other DNA
aaaggaatataaaaacgcccccttaataggggcggtttttaagtttaaaa

SEQ ID NO: 63528 - DNA, 50 bp, synthetic construct
  source 1..50: mol_type = other DNA
tttagtacctcaatttctctctctggacggagacgaatcgagaaactaaa

SEQ ID NO: 63529 - DNA, 50 bp, synthetic construct
  source 1..50: mol_type = other DNA
tattctcttcttgactatccatatcaaagtaactaaggaagcttagagat

SEQ ID NO: 63530 - DNA, 50 bp, synthetic construct
  source 1..50: mol_type = other DNA
aaaggttgccgggacatgtggagagttacgcttctggagcgtacacaaaa

SEQ ID NO: 63531 - DNA, 50 bp, synthetic construct
  source 1..50: mol_type = other DNA
aagagaaagaagctaaagagagagctctggcgcttcttctttactcagcc

SEQ ID NO: 63532 - DNA, 50 bp, synthetic construct
  source 1..50: mol_type = other DNA
tgtgttctaactgtagtgacgacacatgtggagactataatagggctacg

SEQ ID NO: 63533 - DNA, 50 bp, synthetic construct
  source 1..50: mol_type = other DNA
ttcgcgaaccgtcaggccgcgcggccacgacggccgtctcggttgtgtaa

SEQ ID NO: 63534 - DNA, 50 bp, synthetic construct
  source 1..50: mol_type = other DNA
tagctaataatttataattttcacatggtgatattgttacttaatagcaa

SEQ ID NO: 63535 - DNA, 50 bp, synthetic construct
  source 1..50: mol_type = other DNA
attactatcatacttaatttttaattaaaattatgacataaaaaaacgcc

SEQ ID NO: 63536 - DNA, 50 bp, synthetic construct
  source 1..50: mol_type = other DNA
ggctggatcgcgcgctaccgacgagccggtccaggccgcgggagggaatg

SEQ ID NO: 63537 - DNA, 50 bp, synthetic construct
  source 1..50: mol_type = other DNA
tgattaggagggagtggtataccactttttctaatatccttttaatttca

SEQ ID NO: 63538 - DNA, 50 bp, synthetic construct
  source 1..50: mol_type = other DNA
tataatgtattggaataataatttataaaagatttcggacaaacattagt

SEQ ID NO: 63539 - DNA, 50 bp, synthetic construct
  source 1..50: mol_type = other DNA
ggccagcgtcggggtcttgcccagcggacatcgcgcgcgagctgctggcc

SEQ ID NO: 63540 - DNA, 50 bp, synthetic construct
  source 1..50: mol_type = other DNA
cgagcgcctccttcgggccgacgatgacgctgtccccaaagaatcggcca

SEQ ID NO: 63541 - DNA, 50 bp, synthetic construct
  source 1..50: mol_type = other DNA
tccccttcgatcattcctacatcgatcgacggaggcatgacccggaagat

SEQ ID NO: 63542 - DNA, 50 bp, synthetic construct
  source 1..50: mol_type = other DNA
ctcatcacggtataatcacgggtccgcaccggtgatttagaagtcatgat

SEQ ID NO: 63543 - DNA, 50 bp, synthetic construct
  source 1..50: mol_type = other DNA
atgtgcataacctcctgtgcgtccatggagatcaaggacatccggcagtt

SEQ ID NO: 63544 - DNA, 50 bp, synthetic construct
  source 1..50: mol_type = other DNA
cctccatcctgagactccccacagccctgtgtcctgtctcacgctgtcgg

SEQ ID NO: 63545 - DNA, 50 bp, synthetic construct
  source 1..50: mol_type = other DNA
ataaaaatttggaactttgattttctgttgacttgatgcaaaattcacca

SEQ ID NO: 63546 - DNA, 50 bp, synthetic construct
  source 1..50: mol_type = other DNA
atagccagagtagtaaaccatccaagcttatggcctaattagcttgctat

SEQ ID NO: 63547 - DNA, 50 bp, synthetic construct
  source 1..50: mol_type = other DNA
aatgttgaaatgtaaaatgatcagaaaaaaatcttttacaatgtgtcata

SEQ ID NO: 63548 - DNA, 50 bp, synthetic construct
  source 1..50: mol_type = other DNA
gcttttctcatagttaaaaaatcattccatttttttgatatatataaata

SEQ ID NO: 63549 - DNA, 50 bp, synthetic construct
  source 1..50: mol_type = other DNA
tacggcatttctgcaagaaactgcgagcacttttttacacaagtgccgta

SEQ ID NO: 63550 - DNA, 50 bp, synthetic construct
  source 1..50: mol_type = other DNA
atttgtaataataccacagccatttgaataggtgaagcattactacaaaa

SEQ ID NO: 63551 - DNA, 50 bp, synthetic construct
  source 1..50: mol_type = other DNA
gcgtcagcttggcaggctttccggcgccacgcagcacgccgggcgtacgc

SEQ ID NO: 63552 - DNA, 50 bp, synthetic construct
  source 1..50: mol_type = other DNA
gatcttaatataagtttggaaaatgagtgcatagcgttgatacaaagagt

SEQ ID NO: 63553 - DNA, 50 bp, synthetic construct
  source 1..50: mol_type = other DNA
tttttgcaaacactacgcatctcaaatgtgatgtgtagggattgcaaaga

SEQ ID NO: 63554 - DNA, 50 bp, synthetic construct
  source 1..50: mol_type = other DNA
tccattccaacacctctcttatcggccgatgagataggtatccatgatat

SEQ ID NO: 63555 - DNA, 50 bp, synthetic construct
  source 1..50: mol_type = other DNA
cagctttgtatcaagagtgcgtgaaatcagaaactgaaaatacgaattaa

SEQ ID NO: 63556 - DNA, 50 bp, synthetic construct
  source 1..50: mol_type = other DNA
attttcattgtcttctttttaaatactaataaaatacaaacatttaaaat

SEQ ID NO: 63557 - DNA, 50 bp, synthetic construct
  source 1..50: mol_type = other DNA
ctgggcgggtcagctcatccaggcgggcgtggcgacgttcatgggcccat

SEQ ID NO: 63558 - DNA, 50 bp, synthetic construct
  source 1..50: mol_type = other DNA
gtggcattcgcgggcatctctttgcctcgctaattggtcgcgaaggcatg

SEQ ID NO: 63559 - DNA, 50 bp, synthetic construct
  source 1..50: mol_type = other DNA
ggccgcagccagatcgcacagcggtgccaaatagcggatcaactgcggcg

SEQ ID NO: 63560 - DNA, 50 bp, synthetic construct
  source 1..50: mol_type = other DNA
gaatttatatatgcacacattatcatgtaaatatgtgcatatataaatag

SEQ ID NO: 63561 - DNA, 50 bp, synthetic construct
  source 1..50: mol_type = other DNA
ccgacggcagccgcctgcacgccgtcgacggctgacgccgctgccgacga

SEQ ID NO: 63562 - DNA, 50 bp, synthetic construct
  source 1..50: mol_type = other DNA
gtatcccattatatgacttatgggaagccgtccgccacctaattcgactt

SEQ ID NO: 63563 - DNA, 50 bp, synthetic construct
  source 1..50: mol_type = other DNA
aataatttaatcttaaatgaaatttaaataaaaattaaacaaaaattata

SEQ ID NO: 63564 - DNA, 50 bp, synthetic construct
  source 1..50: mol_type = other DNA
tttagttcctcgtttcctctcgttggaagaagaagaaacgagataccaaa

SEQ ID NO: 63565 - DNA, 50 bp, synthetic construct
  source 1..50: mol_type = other DNA
tatataaatatatgcaaagataactttattggtaaaaatatataaatata

SEQ ID NO: 63566 - DNA, 50 bp, synthetic construct
  source 1..50: mol_type = other DNA
acttccgtagagcattacccgacttaagaagcctatgggtaagcaagccc

SEQ ID NO: 63567 - DNA, 50 bp, synthetic construct
  source 1..50: mol_type = other DNA
gccgatatgtttattccgaattttgaaaaaagccggatacatatatcgac

SEQ ID NO: 63568 - DNA, 50 bp, synthetic construct
  source 1..50: mol_type = other DNA
actaaaaaaccgcatcatttatgatatcggttaagaatgaggtttttata

SEQ ID NO: 63569 - DNA, 50 bp, synthetic construct
  source 1..50: mol_type = other DNA
aaaactataaatgtattctgcctgcttggttacaactgctgccttctttt

SEQ ID NO: 63570 - DNA, 50 bp, synthetic construct
  source 1..50: mol_type = other DNA
ttgtatgcagttagacctctatctcaacaaggaggtctaactatgaaaac

SEQ ID NO: 63571 - DNA, 50 bp, synthetic construct
  source 1..50: mol_type = other DNA
tcgaactgatgatctgataccggcgcccgagcggttgaacgtcgccacct

SEQ ID NO: 63572 - DNA, 50 bp, synthetic construct
  source 1..50: mol_type = other DNA
ccgcgccacggcttccgcgagccgccgcgatcgcctgtgccgcggcgcgc

SEQ ID NO: 63573 - DNA, 50 bp, synthetic construct
  source 1..50: mol_type = other DNA
cccgtgccgcccgtcgggcgagcatgatcctgcccgacgggcgggtgctg

SEQ ID NO: 63574 - DNA, 50 bp, synthetic construct
  source 1..50: mol_type = other DNA
tgccgacttcgcgccgcacctcgtcgacagcaacagcgtcgagcgaacca

SEQ ID NO: 63575 - DNA, 50 bp, synthetic construct
  source 1..50: mol_type = other DNA
gccactggtcaacgatacccgctcgcgggatcgaaccgctgaccccctgc

SEQ ID NO: 63576 - DNA, 50 bp, synthetic construct
  source 1..50: mol_type = other DNA
atcatactgaagctgaaattgtaaaattaagaagggagtttcactaatga

SEQ ID NO: 63577 - DNA, 50 bp, synthetic construct
  source 1..50: mol_type = other DNA
ctagatgaactaccccgaacttgtccgcgcctgcccggcgtttcaggatg

SEQ ID NO: 63578 - DNA, 50 bp, synthetic construct
  source 1..50: mol_type = other DNA
ctttaaccttcttatccttacattttcttgtacctattttatcaaaaaag

SEQ ID NO: 63579 - DNA, 50 bp, synthetic construct
  source 1..50: mol_type = other DNA
tcaacatgttaggaaacaatgccttgtaaaatataggtataactataacg

SEQ ID NO: 63580 - DNA, 50 bp, synthetic construct
  source 1..50: mol_type = other DNA
gtggttttgcaaatatttatttccaaaggaacgaatatgggcaaaaacat

SEQ ID NO: 63581 - DNA, 50 bp, synthetic construct
  source 1..50: mol_type = other DNA
cttattcgttgttttcattgcttttaaatttttaaaatgaaaaaaatgat

SEQ ID NO: 63582 - DNA, 50 bp, synthetic construct
  source 1..50: mol_type = other DNA
ttatattttgtttaacattggattttaaataaaaattaaacaaaaattat

SEQ ID NO: 63583 - DNA, 50 bp, synthetic construct
  source 1..50: mol_type = other DNA
attattcgttaatattttagtagtatttgactcctattaaaaacccaaat

SEQ ID NO: 63584 - DNA, 50 bp, synthetic construct
  source 1..50: mol_type = other DNA
taaagatttatttatcaaaagtttgaattattatgataaacaatgaattg

SEQ ID NO: 63585 - DNA, 50 bp, synthetic construct
  source 1..50: mol_type = other DNA
tttggttttgaaacctttaccggaaaaccgaaaaaacgatgaaaagcgaa

SEQ ID NO: 63586 - DNA, 50 bp, synthetic construct
  source 1..50: mol_type = other DNA
aattaatccatcaaatgtctttagatcggccattattggggacattattt

SEQ ID NO: 63587 - DNA, 50 bp, synthetic construct
  source 1..50: mol_type = other DNA
cagtaagttcaagtgtgcctgctaaatagatacaccttttcgacagacag

SEQ ID NO: 63588 - DNA, 50 bp, synthetic construct
  source 1..50: mol_type = other DNA
tgtaggaacaccagctattttacttgatgaaaaagtataacattcccaca

SEQ ID NO: 63589 - DNA, 50 bp, synthetic construct
  source 1..50: mol_type = other DNA
atccagtaaatctattatttctatccttacaatactacgatttacaacac

SEQ ID NO: 63590 - DNA, 50 bp, synthetic construct
  source 1..50: mol_type = other DNA
acagaatagatgagatattctaacttactaattaatctcgtctataataa

SEQ ID NO: 63591 - DNA, 50 bp, synthetic construct
  source 1..50: mol_type = other DNA
cgtatcgggggtgcccgatatcatgcacgaaaaccgacacccccggagga

SEQ ID NO: 63592 - DNA, 50 bp, synthetic construct
  source 1..50: mol_type = other DNA
gagttctgcacacccttttttatggttataaaatgtggtaagcgaggctc

SEQ ID NO: 63593 - DNA, 50 bp, synthetic construct
  source 1..50: mol_type = other DNA
tatactttatcaataacaatacctaaatttattgttaaaatgtaaggata

SEQ ID NO: 63594 - DNA, 50 bp, synthetic construct
  source 1..50: mol_type = other DNA
cttaccaatatactatcacctttataggaaggagcctgaatggcagtaag

SEQ ID NO: 63595 - DNA, 50 bp, synthetic construct
  source 1..50: mol_type = other DNA
gattgacatttctaggaatgagtagttattccagccaagaaagtgcagct

SEQ ID NO: 63596 - DNA, 50 bp, synthetic construct
  source 1..50: mol_type = other DNA
tcattcagaaaggacggtagacatgaatttctaccgtattggaaaaaaat

SEQ ID NO: 63597 - DNA, 50 bp, synthetic construct
  source 1..50: mol_type = other DNA
gtctttttttggtgtttctgtgttataatacggaaatcgtactaagcaga

SEQ ID NO: 63598 - DNA, 50 bp, synthetic construct
  source 1..50: mol_type = other DNA
cttaaaactactttttcaaaacctgtttttttataaaaagtaaattttca

SEQ ID NO: 63599 - DNA, 50 bp, synthetic construct
  source 1..50: mol_type = other DNA
agatgacaacgataataacaaacccggtcttagtcatattcattgattct

SEQ ID NO: 63600 - DNA, 50 bp, synthetic construct
  source 1..50: mol_type = other DNA
tgtaagagggagaaaacgtattttatcaattactatttttccttccgcca

SEQ ID NO: 63601 - DNA, 50 bp, synthetic construct
  source 1..50: mol_type = other DNA
ctcgcatgtacatattaagttttttacattttttcatatcattacatagg

SEQ ID NO: 63602 - DNA, 50 bp, synthetic construct
  source 1..50: mol_type = other DNA
ttatgtgaatatactgtaaataaaattttatataaataatattccctcat

SEQ ID NO: 63603 - DNA, 50 bp, synthetic construct
  source 1..50: mol_type = other DNA
tttgtatatacagtgatagctaggtgaggcctacggcctggcagaacaat

SEQ ID NO: 63604 - DNA, 50 bp, synthetic construct
  source 1..50: mol_type = other DNA
taaaatatttatttactttctgataacatctaaactatatgcggtcttta

SEQ ID NO: 63605 - DNA, 50 bp, synthetic construct
  source 1..50: mol_type = other DNA
agttcgtcaaggtcctcatcctgtcgacaggagcgacagtttgaaccgct

SEQ ID NO: 63606 - DNA, 50 bp, synthetic construct
  source 1..50: mol_type = other DNA
attcaggtgaatgcagatgcataataatatatatttgatttttatttcat

SEQ ID NO: 63607 - DNA, 50 bp, synthetic construct
  source 1..50: mol_type = other DNA
tcaagccagcggatttgctgactttaaaaaaaggaaattatgaaacaaga

SEQ ID NO: 63608 - DNA, 50 bp, synthetic construct
  source 1..50: mol_type = other DNA
gcgcagtccgaggcgaggccgggtcatttagcgttcgcctcgctcggcgc

SEQ ID NO: 63609 - DNA, 50 bp, synthetic construct
  source 1..50: mol_type = other DNA
gaaagttttttgaggttcgtattcgtaaagagcaaaggacggaaactttc

SEQ ID NO: 63610 - DNA, 50 bp, synthetic construct
  source 1..50: mol_type = other DNA
tctagcaacttggctacttacatcgtagccgttttagagtgatgtataga

SEQ ID NO: 63611 - DNA, 50 bp, synthetic construct
  source 1..50: mol_type = other DNA
agttttactttaatacatatatcttcagataaatgtattaaagttcctat

SEQ ID NO: 63612 - DNA, 50 bp, synthetic construct
  source 1..50: mol_type = other DNA
cacactcttgtcataattttttaaatcaaaaaaggggtacaaattcaatg

SEQ ID NO: 63613 - DNA, 50 bp, synthetic construct
  source 1..50: mol_type = other DNA
tgagcgtgcgcgcgcatgaccggattaccggttcccggcgcattttctac

SEQ ID NO: 63614 - DNA, 50 bp, synthetic construct
  source 1..50: mol_type = other DNA
tttgatgcttcactggagtttatcacgactaaagtttgagatacatctaa

SEQ ID NO: 63615 - DNA, 50 bp, synthetic construct
  source 1..50: mol_type = other DNA
ggtgataaactcccatgcaattgattcactccctctggggttggtcacta

SEQ ID NO: 63616 - DNA, 50 bp, synthetic construct
  source 1..50: mol_type = other DNA
tctcctcatcggctttcttttcttcgaaagcgccccggcagaacaggtaa

SEQ ID NO: 63617 - DNA, 50 bp, synthetic construct
  source 1..50: mol_type = other DNA
aaaaatagaaaaaatggagaaaacaagttactaaaattatttatattttc

SEQ ID NO: 63618 - DNA, 50 bp, synthetic construct
  source 1..50: mol_type = other DNA
ttgtagatctcttcggaggtgtgtgccaacacctcccgctggctctggct

SEQ ID NO: 63619 - DNA, 50 bp, synthetic construct
  source 1..50: mol_type = other DNA
attttaaaaatatcttgggttatctttatcaccatagcataacttaaaat

SEQ ID NO: 63620 - DNA, 50 bp, synthetic construct
  source 1..50: mol_type = other DNA
cggccgcttctcgccaggcacgcacgggggcaataagggccaaacggcgg

SEQ ID NO: 63621 - DNA, 50 bp, synthetic construct
  source 1..50: mol_type = other DNA
ataaaataggtacaagaaaagacatcagctgttaccctaaccttgtttat

SEQ ID NO: 63622 - DNA, 50 bp, synthetic construct
  source 1..50: mol_type = other DNA
aaagatgtaaaagaaataaccttctgaagatcgatttggttttgaattta

SEQ ID NO: 63623 - DNA, 50 bp, synthetic construct
  source 1..50: mol_type = other DNA
tcaaaggataggtcgctacttcaattcaaaagatattaccttttgagatg

SEQ ID NO: 63624 - DNA, 50 bp, synthetic construct
  source 1..50: mol_type = other DNA
agtaggtgtcctttcgacgccgcccgctgcctcacgagaggcatccacac

SEQ ID NO: 63625 - DNA, 50 bp, synthetic construct
  source 1..50: mol_type = other DNA
taaaagctcggttttcttatatggaaacatatgaaaaaaaggagaaacga

SEQ ID NO: 63626 - DNA, 50 bp, synthetic construct
  source 1..50: mol_type = other DNA
agatattctgcttgtctcaccgggtttactggaagtgaagcagaatatac

SEQ ID NO: 63627 - DNA, 50 bp, synthetic construct
  source 1..50: mol_type = other DNA
ggcataatctccacccaaaatggagaggttttttgcgtggattttatcct

SEQ ID NO: 63628 - DNA, 50 bp, synthetic construct
  source 1..50: mol_type = other DNA
cggaaaagtttatggtctaaagttagaacttttgagatacctaaaaagaa

SEQ ID NO: 63629 - DNA, 50 bp, synthetic construct
  source 1..50: mol_type = other DNA
ttaaaagattatgcaacgaataattaagttagtacacataaattatataa

SEQ ID NO: 63630 - DNA, 50 bp, synthetic construct
  source 1..50: mol_type = other DNA
attcagggcataatccgggccagataaatggttaagattatccccatcat

SEQ ID NO: 63631 - DNA, 50 bp, synthetic construct
  source 1..50: mol_type = other DNA
taacacctaattccttagccaccgctcgttatacgtcgatttaggccgct

SEQ ID NO: 63632 - DNA, 50 bp, synthetic construct
  source 1..50: mol_type = other DNA
tgtaccgcattagcgatccctcgccagcgaggcgatgctaaggctggttc

SEQ ID NO: 63633 - DNA, 50 bp, synthetic construct
  source 1..50: mol_type = other DNA
gcgtggtgacggccttaaccttccgctgcgttgcgcggccgacgcatcga

SEQ ID NO: 63634 - DNA, 50 bp, synthetic construct
  source 1..50: mol_type = other DNA
actatatgcatactctgcctgcttataatcagttactgtatcagattatt

SEQ ID NO: 63635 - DNA, 50 bp, synthetic construct
  source 1..50: mol_type = other DNA
ctgtaattatcaagtcatatatccatttgcccactgctttttccatattt

SEQ ID NO: 63636 - DNA, 50 bp, synthetic construct
  source 1..50: mol_type = other DNA
taaagctcctcaaattaacctaaaaggttaggctgattttcttatcttct

SEQ ID NO: 63637 - DNA, 50 bp, synthetic construct
  source 1..50: mol_type = other DNA
tggctcataaatggctcatatttttgtcagaatttagcaatgttccatct

SEQ ID NO: 63638 - DNA, 50 bp, synthetic construct
  source 1..50: mol_type = other DNA
agaccattaacttttaatttctgatgaagaggctgatatgtggctggttt

SEQ ID NO: 63639 - DNA, 50 bp, synthetic construct
  source 1..50: mol_type = other DNA
ataggctttctgagcgattagtccatggattaatgaccgcaaaaccaaag

SEQ ID NO: 63640 - DNA, 50 bp, synthetic construct
  source 1..50: mol_type = other DNA
gttcgtgctttcgttgatctgcgcacctttcttacaacctttgctttttc

SEQ ID NO: 63641 - DNA, 50 bp, synthetic construct
  source 1..50: mol_type = other DNA
acaggaatttggaatttaagctaatgttagcttttatctcattcgtggga

SEQ ID NO: 63642 - DNA, 50 bp, synthetic construct
  source 1..50: mol_type = other DNA
aacaaatcaaagattgacacgtgcaaaatcatgaaaattgcagatttata

SEQ ID NO: 63643 - DNA, 50 bp, synthetic construct
  source 1..50: mol_type = other DNA
cctccctcgaaaccgaaatttacctgagtacatgatagctccatggtaat

SEQ ID NO: 63644 - DNA, 50 bp, synthetic construct
  source 1..50: mol_type = other DNA
ttgaaagaaaaccagttcgactgacaggattcgaacctgtgacctctgcc

SEQ ID NO: 63645 - DNA, 50 bp, synthetic construct
  source 1..50: mol_type = other DNA
ggccgagtaggggtcgcgcagcacccgtcccgcgcagggccggtctggag

SEQ ID NO: 63646 - DNA, 50 bp, synthetic construct
  source 1..50: mol_type = other DNA
tccacaccattatattgtttgacatctgttaaagtatctaatgtggtggt

SEQ ID NO: 63647 - DNA, 50 bp, synthetic construct
  source 1..50: mol_type = other DNA
gaaaatgagaatgatgaaagagagttccgtttttcttcttcctcatcttc

SEQ ID NO: 63648 - DNA, 50 bp, synthetic construct
  source 1..50: mol_type = other DNA
ttagtagcaataggttatttagataatttaaaataaggatttgataccat

SEQ ID NO: 63649 - DNA, 50 bp, synthetic construct
  source 1..50: mol_type = other DNA
tacctataatagtaattttagaattttaaagaataatactatattatatg

SEQ ID NO: 63650 - DNA, 50 bp, synthetic construct
  source 1..50: mol_type = other DNA
tacccgggacttaattgtatttaagcttgaataaaatttgtatataccta

SEQ ID NO: 63651 - DNA, 50 bp, synthetic construct
  source 1..50: mol_type = other DNA
tcctccttggtcagagaacaattatatcattttctttaatgtacaccgga

SEQ ID NO: 63652 - DNA, 50 bp, synthetic construct
  source 1..50: mol_type = other DNA
tttgaaatagatacccattagtgttttcattagataagtgttattgaaat

SEQ ID NO: 63653 - DNA, 50 bp, synthetic construct
  source 1..50: mol_type = other DNA
cagtgataatatatatttatggatgagataatatatatttgatttgtcat

SEQ ID NO: 63654 - DNA, 50 bp, synthetic construct
  source 1..50: mol_type = other DNA
gtttttaaagtagatctcttttaattgataaagagcaattcttgaaaata

SEQ ID NO: 63655 - DNA, 50 bp, synthetic construct
  source 1..50: mol_type = other DNA
ccattcgacaagaaacgtgaattcaatccaatacgtttctttttgagttg

SEQ ID NO: 63656 - DNA, 50 bp, synthetic construct
  source 1..50: mol_type = other DNA
gttttttctttaaatctttcataagttattgaaattgataaagagcaatt

SEQ ID NO: 63657 - DNA, 50 bp, synthetic construct
  source 1..50: mol_type = other DNA
cacctccaaaaaaataatatatatttatatatattatttatttataaaaa

SEQ ID NO: 63658 - DNA, 50 bp, synthetic construct
  source 1..50: mol_type = other DNA
gacaatatcaattcagggcaatcaccgcgccagctaaaattgacattgtc

SEQ ID NO: 63659 - DNA, 50 bp, synthetic construct
  source 1..50: mol_type = other DNA
cctgttcctgcgcggcttcgaccgcactctaactgagttcacgaaacagg

SEQ ID NO: 63660 - DNA, 50 bp, synthetic construct
  source 1..50: mol_type = other DNA
cactctgataagcaactcacacaagacataatgagttcctcaatgattat

SEQ ID NO: 63661 - DNA, 50 bp, synthetic construct
  source 1..50: mol_type = other DNA
gcggccttgatcaggcggctgatcaccaaaagcaagcgggtgaaggccgc

SEQ ID NO: 63662 - DNA, 50 bp, synthetic construct
  source 1..50: mol_type = other DNA
cgacgtggacaccgacaccgtcctcgaggcacttggcgcagaggacgcgc

SEQ ID NO: 63663 - DNA, 50 bp, synthetic construct
  source 1..50: mol_type = other DNA
agcttgggtttcattgagtgtgattcatcaaagtcataaaaaagcacagt

SEQ ID NO: 63664 - DNA, 50 bp, synthetic construct
  source 1..50: mol_type = other DNA
ccatctatggttaatccgttgataaattccaattaaaacaccaaaaatag

SEQ ID NO: 63665 - DNA, 50 bp, synthetic construct
  source 1..50: mol_type = other DNA
tttttgttatcttctttgtcatagataaaatataaaaaagataataaaca

SEQ ID NO: 63666 - DNA, 50 bp, synthetic construct
  source 1..50: mol_type = other DNA
atgagctgtggcagcgcgtccagacgcgcgcgagcgcgccgacagctcat

SEQ ID NO: 63667 - DNA, 50 bp, synthetic construct
  source 1..50: mol_type = other DNA
cgcttgcgcaccatcttcttcatcaagatgaagaaccgcgttctcaactc

SEQ ID NO: 63668 - DNA, 50 bp, synthetic construct
  source 1..50: mol_type = other DNA
gcgtgtgctactgtgtgggactggatgctgtcaaccagagtagcacacgc

SEQ ID NO: 63669 - DNA, 50 bp, synthetic construct
  source 1..50: mol_type = other DNA
aacgaaagcgtcgtgctgcctgtcgcgaccaccggcacgaccccccagcc

SEQ ID NO: 63670 - DNA, 50 bp, synthetic construct
  source 1..50: mol_type = other DNA
agtattttatttttggtaatatgaattcagttcatacaaaataaagtaca

SEQ ID NO: 63671 - DNA, 50 bp, synthetic construct
  source 1..50: mol_type = other DNA
ttatctacattatattgataaatatggatttccgttgatacacgaacata

SEQ ID NO: 63672 - DNA, 50 bp, synthetic construct
  source 1..50: mol_type = other DNA
gtgttgctactgaaaaaggcttagacaagaccgatagtctgtagcaataa

SEQ ID NO: 63673 - DNA, 50 bp, synthetic construct
  source 1..50: mol_type = other DNA
ctggaatttaactaatcgatacggatccccaattaggtgtaaaactctgc

SEQ ID NO: 63674 - DNA, 50 bp, synthetic construct
  source 1..50: mol_type = other DNA
aagggaagagcttgccagagcagaggataggtcgggcttattcttcgggc

SEQ ID NO: 63675 - DNA, 50 bp, synthetic construct
  source 1..50: mol_type = other DNA
aatggaaagattgtaacccgtccagagggacggcctgaaatagggcttgt

SEQ ID NO: 63676 - DNA, 50 bp, synthetic construct
  source 1..50: mol_type = other DNA
aattacccagccccttcactgagaaggcccaggcaagaggcagcgagctt

SEQ ID NO: 63677 - DNA, 50 bp, synthetic construct
  source 1..50: mol_type = other DNA
caactaaaatggtaagtcactatctagtcacaaaaactgactttttattt

SEQ ID NO: 63678 - DNA, 50 bp, synthetic construct
  source 1..50: mol_type = other DNA
agtgacctccttttaatattcattataatgaaaataaaatggatgttcta

SEQ ID NO: 63679 - DNA, 50 bp, synthetic construct
  source 1..50: mol_type = other DNA
cctggtttagaaaatgccaaatttatataggaggtcttttcaatgaaagc

SEQ ID NO: 63680 - DNA, 50 bp, synthetic construct
  source 1..50: mol_type = other DNA
ttattttgtgtttgtgaattttaatttaaaattaaaaaaatccaatatta

SEQ ID NO: 63681 - DNA, 50 bp, synthetic construct
  source 1..50: mol_type = other DNA
aataaaagtatgtaaggctcttgactacaacagcctttccatcttcaatt

SEQ ID NO: 63682 - DNA, 50 bp, synthetic construct
  source 1..50: mol_type = other DNA
acgtataacgaaaaagataaacctaaaaaggagccttttaggagcggtca

SEQ ID NO: 63683 - DNA, 50 bp, synthetic construct
  source 1..50: mol_type = other DNA
ttaattcataatatgtaggttattataatctatcggattttattgctaaa

SEQ ID NO: 63684 - DNA, 50 bp, synthetic construct
  source 1..50: mol_type = other DNA
accagcaagatgaacagtacaagaatttttgttctgttattatttatggt

SEQ ID NO: 63685 - DNA, 50 bp, synthetic construct
  source 1..50: mol_type = other DNA
ttctggaggtcagtagagaatcgcgctagattctctatgttttcccggaa

SEQ ID NO: 63686 - DNA, 50 bp, synthetic construct
  source 1..50: mol_type = other DNA
ggcgccgcatcgcgccggacatcacctgatgtcaggagcgaatgatcgcc

SEQ ID NO: 63687 - DNA, 50 bp, synthetic construct
  source 1..50: mol_type = other DNA
tcattcatacgattatacctccgataagtgatttaaagcttgacatattt

SEQ ID NO: 63688 - DNA, 50 bp, synthetic construct
  source 1..50: mol_type = other DNA
cgggaaaccacctttgataagtctagataggcatcaaaggtctgctccgt

SEQ ID NO: 63689 - DNA, 50 bp, synthetic construct
  source 1..50: mol_type = other DNA
attttattttttagatttgtctttcgaaacacgtgtaatagaaataaacc

SEQ ID NO: 63690 - DNA, 50 bp, synthetic construct
  source 1..50: mol_type = other DNA
tggcacaagccgctccgtcttctaagctgtacactgagcccctttccatc

SEQ ID NO: 63691 - DNA, 50 bp, synthetic construct
  source 1..50: mol_type = other DNA
aattattatagatatgcaatttaatatgaaaaatgaactggataataaaa

SEQ ID NO: 63692 - DNA, 50 bp, synthetic construct
  source 1..50: mol_type = other DNA
tttaggaccgtcaggatgcggaaaattttgctgcaactgcaggcgcattt

SEQ ID NO: 63693 - DNA, 50 bp, synthetic construct
  source 1..50: mol_type = other DNA
cgaatgctacgcacgcaaaaaagcccgcttcgaatgctgatgaacaacct

SEQ ID NO: 63694 - DNA, 50 bp, synthetic construct
  source 1..50: mol_type = other DNA
tatatgggctcggcgcgataccccgccgcccttcgcgccgcccagaatcc

SEQ ID NO: 63695 - DNA, 50 bp, synthetic construct
  source 1..50: mol_type = other DNA
ttgctaggttcgcgttgtttgcacaactgcaaacacgccctaccccgcgc

SEQ ID NO: 63696 - DNA, 50 bp, synthetic construct
  source 1..50: mol_type = other DNA
catgagagccccggagtcacccctccaggcggcgctccggcgcgggcgtc

SEQ ID NO: 63697 - DNA, 50 bp, synthetic construct
  source 1..50: mol_type = other DNA
ttcgggacgccggtcacgcagccccaggaaggcgtgacaggcggctggat

SEQ ID NO: 63698 - DNA, 50 bp, synthetic construct
  source 1..50: mol_type = other DNA
aagaaatacacaaacaaaacattcaaccatgttctttttgttaattattt

SEQ ID NO: 63699 - DNA, 50 bp, synthetic construct
  source 1..50: mol_type = other DNA
gccaatgcttctggtggtgttggtgccgcaccaccacaggaacctatttc

SEQ ID NO: 63700 - DNA, 50 bp, synthetic construct
  source 1..50: mol_type = other DNA
tcgagacgctggcacacggtgatggccggcatcttcagcacccgtctcgg

SEQ ID NO: 63701 - DNA, 50 bp, synthetic construct
  source 1..50: mol_type = other DNA
tgcccggcacgggatcggctgcgacatcaggtgcgaaccaaactctttcc

SEQ ID NO: 63702 - DNA, 50 bp, synthetic construct
  source 1..50: mol_type = other DNA
atttaaaaataattaatgtagtttaaaacaaaaactaattaaattagccc

SEQ ID NO: 63703 - DNA, 50 bp, synthetic construct
  source 1..50: mol_type = other DNA
ctgccccgctgtggcaagacccgatcttcgtgcttgcaagaaacccgcca

SEQ ID NO: 63704 - DNA, 50 bp, synthetic construct
  source 1..50: mol_type = other DNA
aaattcgttaaaaaatgataaaataggttttagttgtaatttgcgaattt

SEQ ID NO: 63705 - DNA, 50 bp, synthetic construct
  source 1..50: mol_type = other DNA
tttttaagtaattatttttatgtattgacaggtaaacaagttgctaataa

SEQ ID NO: 63706 - DNA, 50 bp, synthetic construct
  source 1..50: mol_type = other DNA
aggtgctattcagtactttagaaacttttattgtgttagtgtcttcgcaa

SEQ ID NO: 63707 - DNA, 50 bp, synthetic construct
  source 1..50: mol_type = other DNA
aagttctttcttaagcacactgtggaggcatggtgctgaagccggaaccg

SEQ ID NO: 63708 - DNA, 50 bp, synthetic construct
  source 1..50: mol_type = other DNA
tggtctcccacagcgctaccgcctcgaattctatgtgcggcggttagcca

SEQ ID NO: 63709 - DNA, 50 bp, synthetic construct
  source 1..50: mol_type = other DNA
ctcggcgccgtcggcgcggtgtcccgcacccccgcttcccgggcgacggc

SEQ ID NO: 63710 - DNA, 50 bp, synthetic construct
  source 1..50: mol_type = other DNA
ttttgacattgccatactgcttcaccagaagcagtcggtcaggatcagga

SEQ ID NO: 63711 - DNA, 50 bp, synthetic construct
  source 1..50: mol_type = other DNA
caaaagggcaatagtgttcaaccgcaaatttgaacattcttatacactga

SEQ ID NO: 63712 - DNA, 50 bp, synthetic construct
  source 1..50: mol_type = other DNA
ttaattttggcagattgaattaaattactaatcaaatctgacaaaatcga

SEQ ID NO: 63713 - DNA, 50 bp, synthetic construct
  source 1..50: mol_type = other DNA
attagtcaatagtcatgccattatgctggatagagtgactgactacgaat

SEQ ID NO: 63714 - DNA, 50 bp, synthetic construct
  source 1..50: mol_type = other DNA
ttttttgccttactgcagaatcactccaaaaactgtgttgctccaaaatg

SEQ ID NO: 63715 - DNA, 50 bp, synthetic construct
  source 1..50: mol_type = other DNA
tgatatgattgatattgataagttgaaagggtacaatatgaacacaatca

SEQ ID NO: 63716 - DNA, 50 bp, synthetic construct
  source 1..50: mol_type = other DNA
gggacgtagatcgactccatgtcggacgacgtggagttcgatgccgtccc

SEQ ID NO: 63717 - DNA, 50 bp, synthetic construct
  source 1..50: mol_type = other DNA
gaacgcgccaggctgcgcaaactggccattgcgcgcgcgatggccttggc

SEQ ID NO: 63718 - DNA, 50 bp, synthetic construct
  source 1..50: mol_type = other DNA
ctccggccgcgtccagcgcggccagctgtcgtgtcgctacgcgtccggtg

SEQ ID NO: 63719 - DNA, 50 bp, synthetic construct
  source 1..50: mol_type = other DNA
agataaatctttataataggaaaattttaaatcattaaatcttttataag

SEQ ID NO: 63720 - DNA, 50 bp, synthetic construct
  source 1..50: mol_type = other DNA
cctgcatttcctttcatttcccgcctgctgaaaataaaacccgatgcaag

SEQ ID NO: 63721 - DNA, 50 bp, synthetic construct
  source 1..50: mol_type = other DNA
cacttcctcggcaaagcattcccgtgatggaaaagctgcttgaggaactc

SEQ ID NO: 63722 - DNA, 50 bp, synthetic construct
  source 1..50: mol_type = other DNA
gaatgtaaaattgagcatgcggattatgcaaggagttcaagacgggattc

SEQ ID NO: 63723 - DNA, 50 bp, synthetic construct
  source 1..50: mol_type = other DNA
gcacaaattggagttcaagtccggcagcgaacaagaaaagcaatttgttg

SEQ ID NO: 63724 - DNA, 50 bp, synthetic construct
  source 1..50: mol_type = other DNA
agccgtatccttcagcttacttctttggattgcagcccagcagtaagaaa

SEQ ID NO: 63725 - DNA, 50 bp, synthetic construct
  source 1..50: mol_type = other DNA
gtaattcggaatacacagtagcttcgaagcctgtgggataacctttgtct

SEQ ID NO: 63726 - DNA, 50 bp, synthetic construct
  source 1..50: mol_type = other DNA
ataacgggtttcacagcgcgggcagcgactcgggctatgagcccgtttat

SEQ ID NO: 63727 - DNA, 50 bp, synthetic construct
  source 1..50: mol_type = other DNA
agtgctcgccaccgccggaggcctcggcttatccacatctcgcaagtact

SEQ ID NO: 63728 - DNA, 50 bp, synthetic construct
  source 1..50: mol_type = other DNA
ttgccgcctatgcccgcgtttcaacggcaggtcgccgccatagtcggcaa

SEQ ID NO: 63729 - DNA, 50 bp, synthetic construct
  source 1..50: mol_type = other DNA
cgaggagaattagcgattagcaaaattttgacgggaaagcattcacggag

SEQ ID NO: 63730 - DNA, 50 bp, synthetic construct
  source 1..50: mol_type = other DNA
tagcagagaaattatcctctctgtctacttagatgatggtatctccggta

SEQ ID NO: 63731 - DNA, 50 bp, synthetic construct
  source 1..50: mol_type = other DNA
acattgatgtcaagggttgagaaatattttccatatcttgagataaactc

SEQ ID NO: 63732 - DNA, 50 bp, synthetic construct
  source 1..50: mol_type = other DNA
caccctatggatatagaattgaagatcttctttattttatctaacaagtc

SEQ ID NO: 63733 - DNA, 50 bp, synthetic construct
  source 1..50: mol_type = other DNA
cattggccacgcccgcagggccgccgttcaacgggagggcgtggatcatg

SEQ ID NO: 63734 - DNA, 50 bp, synthetic construct
  source 1..50: mol_type = other DNA
ggatagaaaatcattcgtcgtaaacattaactcaataaaatttaatatcc

SEQ ID NO: 63735 - DNA, 50 bp, synthetic construct
  source 1..50: mol_type = other DNA
gtactgtacatccatacagtacaagctctgaagttacggcgactaagctt

SEQ ID NO: 63736 - DNA, 50 bp, synthetic construct
  source 1..50: mol_type = other DNA
tgtgccgagccgatctcgggcgggcgcaccctggtagtaaccccggaatt

SEQ ID NO: 63737 - DNA, 50 bp, synthetic construct
  source 1..50: mol_type = other DNA
aagaaatagactagatggttatgcttttataaccccataaaccttgactt

SEQ ID NO: 63738 - DNA, 50 bp, synthetic construct
  source 1..50: mol_type = other DNA
gatatcgtaacaatttcatcttctataaaagatgaaaatatcgatagtcc

SEQ ID NO: 63739 - DNA, 50 bp, synthetic construct
  source 1..50: mol_type = other DNA
atacaaaattcaagatggagaggttaagactttcaccttgctttttgtac

SEQ ID NO: 63740 - DNA, 50 bp, synthetic construct
  source 1..50: mol_type = other DNA
ttcttctaaaagtttagtgattagaatacttatatagtctgatagaaagc

SEQ ID NO: 63741 - DNA, 50 bp, synthetic construct
  source 1..50: mol_type = other DNA
ttctcatcctcttcatgatctacacgtacgcgctatgacgatcatgctgg

SEQ ID NO: 63742 - DNA, 50 bp, synthetic construct
  source 1..50: mol_type = other DNA
cctggttgggctggctttgcgccaggaggtgctgcgccagcccctggagg

SEQ ID NO: 63743 - DNA, 50 bp, synthetic construct
  source 1..50: mol_type = other DNA
gcgctaacatcattcactctcctagtataggttcgtgatgatcttctata

SEQ ID NO: 63744 - DNA, 50 bp, synthetic construct
  source 1..50: mol_type = other DNA
caaaccattttaccgataacattaattaatggcatacaatccatccttta

SEQ ID NO: 63745 - DNA, 50 bp, synthetic construct
  source 1..50: mol_type = other DNA
cagttagcaattccatttattaattagttccaaaacaaggttgttttcag

SEQ ID NO: 63746 - DNA, 50 bp, synthetic construct
  source 1..50: mol_type = other DNA
aattagtggaaaaagatggaaaacaaattcacacttttttgaaaggtatt

SEQ ID NO: 63747 - DNA, 50 bp, synthetic construct
  source 1..50: mol_type = other DNA
ttcctcgaagcgtcaaaatttgttcccacaaaccttgctagtgaagggag

SEQ ID NO: 63748 - DNA, 50 bp, synthetic construct
  source 1..50: mol_type = other DNA
gtcacccactgacgtgcccgacctaccggccgggccgccgagagggagag

SEQ ID NO: 63749 - DNA, 50 bp, synthetic construct
  source 1..50: mol_type = other DNA
caggagtgtgttcttgtgttttagaaaagctacatgtgaatgtggtggac

SEQ ID NO: 63750 - DNA, 50 bp, synthetic construct
  source 1..50: mol_type = other DNA
tcgacatggtcttctgttgcgcatggatagccagatcaagcctctgtcga

SEQ ID NO: 63751 - DNA, 50 bp, synthetic construct
  source 1..50: mol_type = other DNA
cgaggttgctgcatatattcagttccctttgaaaatccccaccacagtgc

SEQ ID NO: 63752 - DNA, 50 bp, synthetic construct
  source 1..50: mol_type = other DNA
agcttctgttatcaaatacgaaggtaccgcacgaaaaatgccaggaaata

SEQ ID NO: 63753 - DNA, 50 bp, synthetic construct
  source 1..50: mol_type = other DNA
gctaaatggcccgcaccgtcacagcagagtgccggcgtgcgcggcgttga

SEQ ID NO: 63754 - DNA, 50 bp, synthetic construct
  source 1..50: mol_type = other DNA
gtgataaatggtattaaagataaaaattcacaactaaaatcattttggaa

SEQ ID NO: 63755 - DNA, 50 bp, synthetic construct
  source 1..50: mol_type = other DNA
tattcaaacatagctgcatttcatattgttatatggactatgtttgataa

SEQ ID NO: 63756 - DNA, 50 bp, synthetic construct
  source 1..50: mol_type = other DNA
gacgaactcgatcagtatcttgtcgccgcaagctcgccgccgagcgtggc

SEQ ID NO: 63757 - DNA, 50 bp, synthetic construct
  source 1..50: mol_type = other DNA
tcccttattagataatattgatgatttgatccataaaaaataagaaggga

SEQ ID NO: 63758 - DNA, 50 bp, synthetic construct
  source 1..50: mol_type = other DNA
ttcggcgcgccggctcccgcggcgttcggcgatttcgccgtaatccgctt

SEQ ID NO: 63759 - DNA, 50 bp, synthetic construct
  source 1..50: mol_type = other DNA
tagaaagaattaaggatattgttcatggaccatatccttaatcgcgatat

SEQ ID NO: 63760 - DNA, 50 bp, synthetic construct
  source 1..50: mol_type = other DNA
ttacgtgattgttgccgtgacgcgttcgataatctccattctgcgagtaa

SEQ ID NO: 63761 - DNA, 50 bp, synthetic construct
  source 1..50: mol_type = other DNA
cactgcttttttatttttctacgaataagtaggaggaagaaaatatgtat

SEQ ID NO: 63762 - DNA, 50 bp, synthetic construct
  source 1..50: mol_type = other DNA
gcggcaaacatgccagaaaaaacaattgtctttttaaataaaaattaaac

SEQ ID NO: 63763 - DNA, 50 bp, synthetic construct
  source 1..50: mol_type = other DNA
ttgtttagatgtattttatcaattgaatgtgatcgtaattgtctttttaa

SEQ ID NO: 63764 - DNA, 50 bp, synthetic construct
  source 1..50: mol_type = other DNA
cggagtgaccttctcgctgcgcaagacacaacaggaaggagacgacacat

SEQ ID NO: 63765 - DNA, 50 bp, synthetic construct
  source 1..50: mol_type = other DNA
aatatatataaagttctgatttatttgaaaatgaaaatatttttgatatg

SEQ ID NO: 63766 - DNA, 50 bp, synthetic construct
  source 1..50: mol_type = other DNA
gcttcttcttttttgccattatccaaaaggagattcagaaaagcccgcag

SEQ ID NO: 63767 - DNA, 50 bp, synthetic construct
  source 1..50: mol_type = other DNA
ggattagcggcagcgcgtgagaagggcttctcaggagctaatgctaagtc

SEQ ID NO: 63768 - DNA, 50 bp, synthetic construct
  source 1..50: mol_type = other DNA
ccttttggttatgatcgtattgataatcatgattattcttaacaacaaac

SEQ ID NO: 63769 - DNA, 50 bp, synthetic construct
  source 1..50: mol_type = other DNA
catacagcccaaataaaaaatgattcattatattgaatagattgattatt

SEQ ID NO: 63770 - DNA, 50 bp, synthetic construct
  source 1..50: mol_type = other DNA
caacttaatatatacaaagtatatattgcgaaaaaggaggtaataagatg

SEQ ID NO: 63771 - DNA, 50 bp, synthetic construct
  source 1..50: mol_type = other DNA
cctcttttttgtattgttcagtctttttatcgaacgcaagataaaagagg

SEQ ID NO: 63772 - DNA, 50 bp, synthetic construct
  source 1..50: mol_type = other DNA
ttacctcctttttttgcacttacatatgtatgtcttgtcaagataggtgg

SEQ ID NO: 63773 - DNA, 50 bp, synthetic construct
  source 1..50: mol_type = other DNA
tgataatctcaaacaaaaggcggtttctacccgcttgacgcagattatag

SEQ ID NO: 63774 - DNA, 50 bp, synthetic construct
  source 1..50: mol_type = other DNA
cagcagctacttttttgaacatatatggaagtaacgaaaagtatggaaaa

SEQ ID NO: 63775 - DNA, 50 bp, synthetic construct
  source 1..50: mol_type = other DNA
gtggggcttaagtcaacttgtcattggtgtcatgttttcttaagcctcaa

SEQ ID NO: 63776 - DNA, 50 bp, synthetic construct
  source 1..50: mol_type = other DNA
tatttctcaagcatttttgtatcaattgcataaaccttgctaatcttata

SEQ ID NO: 63777 - DNA, 50 bp, synthetic construct
  source 1..50: mol_type = other DNA
taacctcccgaaatgcagtgcgtgatctaccgtccgacttcgggagaata

SEQ ID NO: 63778 - DNA, 50 bp, synthetic construct
  source 1..50: mol_type = other DNA
ttttatttaaaataattacatttaatgttttattacatttttcaataaaa

SEQ ID NO: 63779 - DNA, 50 bp, synthetic construct
  source 1..50: mol_type = other DNA
aggccatatccaacctgatgaaagcaggcttgtcaaagtgtacctggagg

SEQ ID NO: 63780 - DNA, 50 bp, synthetic construct
  source 1..50: mol_type = other DNA
aaggaggtgcaagcatgaataaaaccttttattatgcttggtggctgctt

SEQ ID NO: 63781 - DNA, 50 bp, synthetic construct
  source 1..50: mol_type = other DNA
gtggccgcgcagaagcggcgtgttgcaaagctccgctatacgccgtctac

SEQ ID NO: 63782 - DNA, 50 bp, synthetic construct
  source 1..50: mol_type = other DNA
tcgtattttgggcgaacaggttttgctgggactgttcttcggcaatgcga

SEQ ID NO: 63783 - DNA, 50 bp, synthetic construct
  source 1..50: mol_type = other DNA
atttttcttaatatcaccgctcatattatagcaaagaaggccggaaaaat

SEQ ID NO: 63784 - DNA, 50 bp, synthetic construct
  source 1..50: mol_type = other DNA
gggcggagttcggggtggatctggtcgcaggcggaccccgaccgcgagga

SEQ ID NO: 63785 - DNA, 50 bp, synthetic construct
  source 1..50: mol_type = other DNA
gccccggtcacgccggcggcggtggtcagcaacgccggcttgaccgcggc

SEQ ID NO: 63786 - DNA, 50 bp, synthetic construct
  source 1..50: mol_type = other DNA
ttgaaaaacataagcaagatgacaaattgaaccagtcttatgttttatca

SEQ ID NO: 63787 - DNA, 50 bp, synthetic construct
  source 1..50: mol_type = other DNA
gcaacacgttttattttatccattataatgtttataataacttctggaaa

SEQ ID NO: 63788 - DNA, 50 bp, synthetic construct
  source 1..50: mol_type = other DNA
atcctgcatacactggcggatgttctattctcggcccgatattgcttgat

SEQ ID NO: 63789 - DNA, 50 bp, synthetic construct
  source 1..50: mol_type = other DNA
caaagcctgagcctatcggaaacccacgtttgccaatcgccccggtggct

SEQ ID NO: 63790 - DNA, 50 bp, synthetic construct
  source 1..50: mol_type = other DNA
tgacagcaaaagccccacgtgtaggaacactcggcgggctttcgcagtca

SEQ ID NO: 63791 - DNA, 50 bp, synthetic construct
  source 1..50: mol_type = other DNA
tcatcgtggaagtcttccgtgtgccgccaccctgaagaactcctcggcga

SEQ ID NO: 63792 - DNA, 50 bp, synthetic construct
  source 1..50: mol_type = other DNA
aaaagagttgttatgagtcgattgtataatataagcatcataattctttt

SEQ ID NO: 63793 - DNA, 50 bp, synthetic construct
  source 1..50: mol_type = other DNA
aaaaaatgaaaatgttaatactgacaacagcctttccatcttcaattcta

SEQ ID NO: 63794 - DNA, 50 bp, synthetic construct
  source 1..50: mol_type = other DNA
ttttaaatcatattttggtgaacctacattctgtacattttgatttacga

SEQ ID NO: 63795 - DNA, 50 bp, synthetic construct
  source 1..50: mol_type = other DNA
acaaaatttaaacccgtacggtccgaggattatactgtttaaaagtttgt

SEQ ID NO: 63796 - DNA, 50 bp, synthetic construct
  source 1..50: mol_type = other DNA
tgtctcctttttaataaccttttaataataaggtcattaaaaaaacaaaa

SEQ ID NO: 63797 - DNA, 50 bp, synthetic construct
  source 1..50: mol_type = other DNA
gggcggcactgctgccggcggcctgtaagccgccggcagagacgaagcct

SEQ ID NO: 63798 - DNA, 50 bp, synthetic construct
  source 1..50: mol_type = other DNA
atactaaaaaatgaaatagagaatatattccctctttcttctttattgat

SEQ ID NO: 63799 - DNA, 50 bp, synthetic construct
  source 1..50: mol_type = other DNA
tatcttcttctgtgatgttggagatacaacccacaaatattcgttagccc

SEQ ID NO: 63800 - DNA, 50 bp, synthetic construct
  source 1..50: mol_type = other DNA
gatctgaataagactgctgcttgtgtaattcccatttagacataacgttc

SEQ ID NO: 63801 - DNA, 50 bp, synthetic construct
  source 1..50: mol_type = other DNA
gcgaccccgcaggtcccctcggcccgggccggaacgacgctcgacgccta

SEQ ID NO: 63802 - DNA, 50 bp, synthetic construct
  source 1..50: mol_type = other DNA
aacgtcaacggcgtcatgcctctgaccgacggcgtctcgtcgatgacgtt

SEQ ID NO: 63803 - DNA, 50 bp, synthetic construct
  source 1..50: mol_type = other DNA
agttatgagaatcaggtgaattattaataattttgaggattctcaagaga

SEQ ID NO: 63804 - DNA, 50 bp, synthetic construct
  source 1..50: mol_type = other DNA
gttttatggtataattgacatagtttcccgccaagacaattaaatagaaa

SEQ ID NO: 63805 - DNA, 50 bp, synthetic construct
  source 1..50: mol_type = other DNA
tgcacgccgtcagcaccataaaggcgttcttatgctgctgaagctcggcg

SEQ ID NO: 63806 - DNA, 50 bp, synthetic construct
  source 1..50: mol_type = other DNA
ttatatcatcatgtcaataatggaaagcgattaaagatcgcatgcaggcg

SEQ ID NO: 63807 - DNA, 50 bp, synthetic construct
  source 1..50: mol_type = other DNA
ttcatactgaaattcctccttttgatcataagtagctatttcttcttgct

SEQ ID NO: 63808 - DNA, 50 bp, synthetic construct
  source 1..50: mol_type = other DNA
tgttgtcatttagaaatatgctagttaaaaatcatatttatcaccctctc

SEQ ID NO: 63809 - DNA, 50 bp, synthetic construct
  source 1..50: mol_type = other DNA
gaaagcatagaccctgaatttttatatgaaattcggtagtctagtggttc

SEQ ID NO: 63810 - DNA, 50 bp, synthetic construct
  source 1..50: mol_type = other DNA
aggaataaccattacatttcccattaataagaagagtaacataaatttct

SEQ ID NO: 63811 - DNA, 50 bp, synthetic construct
  source 1..50: mol_type = other DNA
actttatttgttgctatcatagtagtatttatgaaaaggacatatagaga

SEQ ID NO: 63812 - DNA, 50 bp, synthetic construct
  source 1..50: mol_type = other DNA
aggtagacgcttagggattggtattgttaccaaagcgggtaggtgtacca

SEQ ID NO: 63813 - DNA, 50 bp, synthetic construct
  source 1..50: mol_type = other DNA
ccctggcacagaccgtttctcctgatcatgagaaataaatcattggcagg

SEQ ID NO: 63814 - DNA, 50 bp, synthetic construct
  source 1..50: mol_type = other DNA
agcaagctctatttatgttattacttattataccactaaaatcgcaaaaa

SEQ ID NO: 63815 - DNA, 50 bp, synthetic construct
  source 1..50: mol_type = other DNA
aattttagtaacctacatttccaccaaaagcaatgatgatttcagtaatt

SEQ ID NO: 63816 - DNA, 50 bp, synthetic construct
  source 1..50: mol_type = other DNA
tgcttgcttatcacgtaacactggatcctactcgccctcgtaagcacttg

SEQ ID NO: 63817 - DNA, 50 bp, synthetic construct
  source 1..50: mol_type = other DNA
tgttctcagcaggatatcgtttttaataaaaagggtacttattgagacat

SEQ ID NO: 63818 - DNA, 50 bp, synthetic construct
  source 1..50: mol_type = other DNA
gccacctttttactcatttgctttttaaaaaaaatacaaaaaatattttt

SEQ ID NO: 63819 - DNA, 50 bp, synthetic construct
  source 1..50: mol_type = other DNA
gcgtgagccggaataatcccgaaagtgagcttgcttattccgctgcgcgc

SEQ ID NO: 63820 - DNA, 50 bp, synthetic construct
  source 1..50: mol_type = other DNA
gtgatcaagccgctgccttcttatcgaggcctgaccaggcgcgtgcccag

SEQ ID NO: 63821 - DNA, 50 bp, synthetic construct
  source 1..50: mol_type = other DNA
acatataagatttttcttacatcaattgaaagaacgaaaatattaaaaga

SEQ ID NO: 63822 - DNA, 50 bp, synthetic construct
  source 1..50: mol_type = other DNA
ttcggcgtatctttcgttttcatggccatcctcgataaagatgagccgtg

SEQ ID NO: 63823 - DNA, 50 bp, synthetic construct
  source 1..50: mol_type = other DNA
tttattgttgtactagcggaatgtctatatgcggttagtacaacaaaatt

SEQ ID NO: 63824 - DNA, 50 bp, synthetic construct
  source 1..50: mol_type = other DNA
tgatgatctcaccagtactgaaacctcattcagtacttaatcaatccatt

SEQ ID NO: 63825 - DNA, 50 bp, synthetic construct
  source 1..50: mol_type = other DNA
acgggagtagattgctattttcatatatctgaaagttcatctaaaatagt

SEQ ID NO: 63826 - DNA, 50 bp, synthetic construct
  source 1..50: mol_type = other DNA
ctgatgggggtgtatagatatacttatttataaggctctaacccctctta

SEQ ID NO: 63827 - DNA, 50 bp, synthetic construct
  source 1..50: mol_type = other DNA
ggggtgcgtcgtcgtccccgcccgggagcgcgagggtcgaaccgcgtgag

SEQ ID NO: 63828 - DNA, 50 bp, synthetic construct
  source 1..50: mol_type = other DNA
tcatcgggggctcactctcacgcggtagaccgcgcccgcgaaccagccga

SEQ ID NO: 63829 - DNA, 50 bp, synthetic construct
  source 1..50: mol_type = other DNA
gaattacctatgtattatattgaagaggtaatatgtcacactggtaaagg

SEQ ID NO: 63830 - DNA, 50 bp, synthetic construct
  source 1..50: mol_type = other DNA
atcacccctcacagaaaagaacccggcacacaggcatctcgatgatttta

SEQ ID NO: 63831 - DNA, 50 bp, synthetic construct
  source 1..50: mol_type = other DNA
aaggaggcaaaaatcatgaacactgccattctcccgattgtccttcttgc

SEQ ID NO: 63832 - DNA, 50 bp, synthetic construct
  source 1..50: mol_type = other DNA
actttgatctgcggaggcatcggcggacagaccgttcacgagctgaaagc

SEQ ID NO: 63833 - DNA, 50 bp, synthetic construct
  source 1..50: mol_type = other DNA
agctccttttggcaaaattttttaagaaaaaggggttgcaaaatgcgcaa

SEQ ID NO: 63834 - DNA, 50 bp, synthetic construct
  source 1..50: mol_type = other DNA
gcaacggttcgcccgtatgtgatctggagtaccataacgacgaaattttt

SEQ ID NO: 63835 - DNA, 50 bp, synthetic construct
  source 1..50: mol_type = other DNA
atattgaggttgttattagatgaaatttcatattaaaaaatataaaatca

SEQ ID NO: 63836 - DNA, 50 bp, synthetic construct
  source 1..50: mol_type = other DNA
ttttatcaacatttttttgctttaaatatttgaaaatggaggtattttat

SEQ ID NO: 63837 - DNA, 50 bp, synthetic construct
  source 1..50: mol_type = other DNA
taatgtgagtaaattttcattaacgtgctaactcaaatggactgacatta

SEQ ID NO: 63838 - DNA, 50 bp, synthetic construct
  source 1..50: mol_type = other DNA
gtaaccaataaaggcacggcacttatgagtgcacacgtggaagtgatttc

SEQ ID NO: 63839 - DNA, 50 bp, synthetic construct
  source 1..50: mol_type = other DNA
ttattacctataacttatcggctcatgggccgggagggggtgggtaataa

SEQ ID NO: 63840 - DNA, 50 bp, synthetic construct
  source 1..50: mol_type = other DNA
atgggacatacaccttatggctaccgccatcggtaattttcctgtcccat

SEQ ID NO: 63841 - DNA, 50 bp, synthetic construct
  source 1..50: mol_type = other DNA
ctgatcattctttcataataatcaacagaaaattatgacaatccaatcag

SEQ ID NO: 63842 - DNA, 50 bp, synthetic construct
  source 1..50: mol_type = other DNA
tttatttgatacaggtgctaggaaacagaaacgcacatctattttattcc

SEQ ID NO: 63843 - DNA, 50 bp, synthetic construct
  source 1..50: mol_type = other DNA
tgatatagataaaaactttgtatttgtaaaaatgccgaaaatcaataaac

SEQ ID NO: 63844 - DNA, 50 bp, synthetic construct
  source 1..50: mol_type = other DNA
ggctttggtggagctgggagctgcgctcaccttccacctcgcagatggaa

SEQ ID NO: 63845 - DNA, 50 bp, synthetic construct
  source 1..50: mol_type = other DNA
ttgccggaataaggagagcagatataacgctgttctagcggtgtcggttc

SEQ ID NO: 63846 - DNA, 50 bp, synthetic construct
  source 1..50: mol_type = other DNA
caggtccaccggataaccctaagttggtagcgggtatagcggtaacgctg

SEQ ID NO: 63847 - DNA, 50 bp, synthetic construct
  source 1..50: mol_type = other DNA
cgccaaaaattaaaaatataaaaacagaattatatttataatgttttgca

SEQ ID NO: 63848 - DNA, 50 bp, synthetic construct
  source 1..50: mol_type = other DNA
ttcattttcccaacgctctatcccttcagcaagggagttttccaaataaa

SEQ ID NO: 63849 - DNA, 50 bp, synthetic construct
  source 1..50: mol_type = other DNA
ttgcggctacgcaagcattttttaatgtataaatgtagtatgaatagcaa

SEQ ID NO: 63850 - DNA, 50 bp, synthetic construct
  source 1..50: mol_type = other DNA
ccatcattgcggattaaccgcagaattctgcgtattccaggcgatggcgt

SEQ ID NO: 63851 - DNA, 50 bp, synthetic construct
  source 1..50: mol_type = other DNA
gtctaccaaaccgtctattcctgcttatcggaaagaacggaaaacaaaaa

SEQ ID NO: 63852 - DNA, 50 bp, synthetic construct
  source 1..50: mol_type = other DNA
aagaaatatttcattacctacgacaaaagtctgtttcagcaatctttctc

SEQ ID NO: 63853 - DNA, 50 bp, synthetic construct
  source 1..50: mol_type = other DNA
gaacggcataagggtatatctttttgtgaagatatactacttcgccaaca

SEQ ID NO: 63854 - DNA, 50 bp, synthetic construct
  source 1..50: mol_type = other DNA
tcatctttttcactccttattcttttaataaaaaggaagtgttgcaatga

SEQ ID NO: 63855 - DNA, 50 bp, synthetic construct
  source 1..50: mol_type = other DNA
ttttttttattattttttccaattataaaaaacaaaaaataaaaagtgcc

SEQ ID NO: 63856 - DNA, 50 bp, synthetic construct
  source 1..50: mol_type = other DNA
aataataaaattcgaataaaatttaaaatgataagtcgtattttaacatc

SEQ ID NO: 63857 - DNA, 50 bp, synthetic construct
  source 1..50: mol_type = other DNA
ataatatttaattttttatcattaaaaatgaataaaattgcaatttacac

SEQ ID NO: 63858 - DNA, 50 bp, synthetic construct
  source 1..50: mol_type = other DNA
cttacaacataaatgttctaaagaaagaatttgaacatttatgttgtaaa

SEQ ID NO: 63859 - DNA, 50 bp, synthetic construct
  source 1..50: mol_type = other DNA
ggtaacactgactgatgaaaaagcatgatttttggtcagacagttggaac

SEQ ID NO: 63860 - DNA, 50 bp, synthetic construct
  source 1..50: mol_type = other DNA
cgcctttagcagtatgcttgaatgtgcatagaaagatacaaaaaaaggag

SEQ ID NO: 63861 - DNA, 50 bp, synthetic construct
  source 1..50: mol_type = other DNA
ataaaattgtttgcagcagatctctgacaatcaaatgcaaagacttcttt

SEQ ID NO: 63862 - DNA, 50 bp, synthetic construct
  source 1..50: mol_type = other DNA
ttttcaaacaaacattcttaatgtatacataaagggtaaaaatcaaaacc

SEQ ID NO: 63863 - DNA, 50 bp, synthetic construct
  source 1..50: mol_type = other DNA
ataaagggacacgcatccgagggtatatcataatctccacaacgaatgta

SEQ ID NO: 63864 - DNA, 50 bp, synthetic construct
  source 1..50: mol_type = other DNA
tataaggccgccggaaacatattccaggatatgtttatagtaataatatc

SEQ ID NO: 63865 - DNA, 50 bp, synthetic construct
  source 1..50: mol_type = other DNA
gcctgaagcttcggatcctcgtattgaaacgaggagcatgaatatccgga

SEQ ID NO: 63866 - DNA, 50 bp, synthetic construct
  source 1..50: mol_type = other DNA
tatcctcctttccgtgtgtctatatagtggattttgaatagaataggata

SEQ ID NO: 63867 - DNA, 50 bp, synthetic construct
  source 1..50: mol_type = other DNA
agtgtcgccgtggggaaacccacggcgatataactgtagtcgcaaaagca

SEQ ID NO: 63868 - DNA, 50 bp, synthetic construct
  source 1..50: mol_type = other DNA
tattttcttatagtgtttatttaaattttatctcattcattaaaaaaatc

SEQ ID NO: 63869 - DNA, 50 bp, synthetic construct
  source 1..50: mol_type = other DNA
tggttttgataatcttcttcttctatggaatagaatagagggtaaaaata

SEQ ID NO: 63870 - DNA, 50 bp, synthetic construct
  source 1..50: mol_type = other DNA
taattttttattccgtatagtaaaaattattgactaaaaataaaaaatga

SEQ ID NO: 63871 - DNA, 50 bp, synthetic construct
  source 1..50: mol_type = other DNA
tatggaaaatatagttttaaaaacttaccttaaaaagcgacacccctaag

SEQ ID NO: 63872 - DNA, 50 bp, synthetic construct
  source 1..50: mol_type = other DNA
aattcattatatgatttttcattaattattaggtaatttagtaattggat

SEQ ID NO: 63873 - DNA, 50 bp, synthetic construct
  source 1..50: mol_type = other DNA
atttagaataatctttgttgaaatattattctataaatccaattaaaaaa

SEQ ID NO: 63874 - DNA, 50 bp, synthetic construct
  source 1..50: mol_type = other DNA
aaaacctgctcaccacatacaaaccgttttcctcgctaagctcagggagc

SEQ ID NO: 63875 - DNA, 50 bp, synthetic construct
  source 1..50: mol_type = other DNA
aatattgaatatattttagatcgtatattatccgcaactcttgcaatgaa

SEQ ID NO: 63876 - DNA, 50 bp, synthetic construct
  source 1..50: mol_type = other DNA
gctgtccttaatcatgttctgaaacttttcagtgaaattttaaagagtgt

SEQ ID NO: 63877 - DNA, 50 bp, synthetic construct
  source 1..50: mol_type = other DNA
cgtaggttttgttttgttatccataaagggaaaacaaagggaaaaaactt

SEQ ID NO: 63878 - DNA, 50 bp, synthetic construct
  source 1..50: mol_type = other DNA
actttgctttatcttgtgaaattttaaagttaatgatgaaaatacagaat

SEQ ID NO: 63879 - DNA, 50 bp, synthetic construct
  source 1..50: mol_type = other DNA
agtaaaccatattatgactggtgctgtcttcagaggtaatatgtcacaca

SEQ ID NO: 63880 - DNA, 50 bp, synthetic construct
  source 1..50: mol_type = other DNA
gcgaaaaagtccacaggctcacacaggtttcgccatgtgagccgtttctt

SEQ ID NO: 63881 - DNA, 50 bp, synthetic construct
  source 1..50: mol_type = other DNA
caggtttatgaagcaaacttatcgcaagagaatatatctcctgaatggtg

SEQ ID NO: 63882 - DNA, 50 bp, synthetic construct
  source 1..50: mol_type = other DNA
agatccgattagacacgaaaataatgctatttcattctctatcctatagc

SEQ ID NO: 63883 - DNA, 50 bp, synthetic construct
  source 1..50: mol_type = other DNA
ttgctgctgttttcattttatttaatttaataaaatgagaatattgaaaa

SEQ ID NO: 63884 - DNA, 50 bp, synthetic construct
  source 1..50: mol_type = other DNA
tttattatttttaggtttaaaatcaaagccttaacgcaaatgaaaatacc

SEQ ID NO: 63885 - DNA, 50 bp, synthetic construct
  source 1..50: mol_type = other DNA
gggaattatcacagaggccacccgcagccatgaccgctgtgatttacgcc

SEQ ID NO: 63886 - DNA, 50 bp, synthetic construct
  source 1..50: mol_type = other DNA
ccgggagagcgccgtgcatggactgcaagaggtcaccggttcgatcccgg

SEQ ID NO: 63887 - DNA, 50 bp, synthetic construct
  source 1..50: mol_type = other DNA
gatataatacaagtgcgaattgtgagtacctttatatcttttattttgta

SEQ ID NO: 63888 - DNA, 50 bp, synthetic construct
  source 1..50: mol_type = other DNA
tgcatttgagcacatttttaacggttgttatcgatgagaaggaatttgaa

SEQ ID NO: 63889 - DNA, 50 bp, synthetic construct
  source 1..50: mol_type = other DNA
gcttcaatcatccaccagccggaagcaataaaaaaaggcgcaccctcgaa

SEQ ID NO: 63890 - DNA, 50 bp, synthetic construct
  source 1..50: mol_type = other DNA
actgatatagcaagtcgaatatcaatgcatagccgactgaatatcatcgt

SEQ ID NO: 63891 - DNA, 50 bp, synthetic construct
  source 1..50: mol_type = other DNA
gcatccatctattttccgggcacgatattgcctggtttccgtatggccat

SEQ ID NO: 63892 - DNA, 50 bp, synthetic construct
  source 1..50: mol_type = other DNA
cggttcccgccacggttccgctggaagtagattaatacgccacgaacccg

SEQ ID NO: 63893 - DNA, 50 bp, synthetic construct
  source 1..50: mol_type = other DNA
ggcagattttcatcaaaacatctgttatgtttattcgattaaattgcgct

SEQ ID NO: 63894 - DNA, 50 bp, synthetic construct
  source 1..50: mol_type = other DNA
caaacaatgcttctgccatgtttttgcctatatctttgaaaagaagttct

SEQ ID NO: 63895 - DNA, 50 bp, synthetic construct
  source 1..50: mol_type = other DNA
taaatagtaaccccaaaaccgagctgcgcggtttttggggtgtggatatt

SEQ ID NO: 63896 - DNA, 50 bp, synthetic construct
  source 1..50: mol_type = other DNA
aagtccgatgcgtcaaatcctccattttaaggagatgatacatatgacta

SEQ ID NO: 63897 - DNA, 50 bp, synthetic construct
  source 1..50: mol_type = other DNA
gttttgcgagggattataacaattataaaaattacacgagcaagcacaga

SEQ ID NO: 63898 - DNA, 50 bp, synthetic construct
  source 1..50: mol_type = other DNA
tgttctgtttttgtttcttttaaaatagcaaaataatgcctagtagattt

SEQ ID NO: 63899 - DNA, 50 bp, synthetic construct
  source 1..50: mol_type = other DNA
attaatatctagtcttttgttgataaagtattaaatgtttctttaataat

SEQ ID NO: 63900 - DNA, 50 bp, synthetic construct
  source 1..50: mol_type = other DNA
tgattgtcaagaaagcgattgatgagcatgaaggaatttgtagacccatt

SEQ ID NO: 63901 - DNA, 50 bp, synthetic construct
  source 1..50: mol_type = other DNA
catagatgttctcgttaaaaattcatgctcctttcgttagatagtagatt

SEQ ID NO: 63902 - DNA, 50 bp, synthetic construct
  source 1..50: mol_type = other DNA
ataggtcaatgatcttagccgatagcatgcggcggagccggaaaaccttt

SEQ ID NO: 63903 - DNA, 50 bp, synthetic construct
  source 1..50: mol_type = other DNA
ctgtgaaaaacgatatgccataaatagtttccagatattctttttcactc

SEQ ID NO: 63904 - DNA, 50 bp, synthetic construct
  source 1..50: mol_type = other DNA
ttttcacacctttaaccccggctttaaattttcggtgcaaggtgtacccc

SEQ ID NO: 63905 - DNA, 50 bp, synthetic construct
  source 1..50: mol_type = other DNA
gttggcatccctaccaatgtatcccagccaccatttcaaggtgcgccaat

SEQ ID NO: 63906 - DNA, 50 bp, synthetic construct
  source 1..50: mol_type = other DNA
gaaagtccagcttccttggcgattttgtgttacatgtattcgtgacttgc

SEQ ID NO: 63907 - DNA, 50 bp, synthetic construct
  source 1..50: mol_type = other DNA
catttcaattaagctcttatacaattctgtatttctgcttcgtcgatctg

SEQ ID NO: 63908 - DNA, 50 bp, synthetic construct
  source 1..50: mol_type = other DNA
gagaaaaaaataattaataagaaaatatagttattttatatttttttttc

SEQ ID NO: 63909 - DNA, 50 bp, synthetic construct
  source 1..50: mol_type = other DNA
gggcgtaaattggtgatgaaaaatgaatttttccactaaaaacgacaaaa

SEQ ID NO: 63910 - DNA, 50 bp, synthetic construct
  source 1..50: mol_type = other DNA
agtttctgtacctttctatccatatatattgatagaatttcctcctgtgg

SEQ ID NO: 63911 - DNA, 50 bp, synthetic construct
  source 1..50: mol_type = other DNA
cggaggcgtttttgttatttgaagaatttgcaggaatttgaaacactcgc

SEQ ID NO: 63912 - DNA, 50 bp, synthetic construct
  source 1..50: mol_type = other DNA
cataggctctcgccacctcaacggcctgcctgaccagaacttgtcctaac

SEQ ID NO: 63913 - DNA, 50 bp, synthetic construct
  source 1..50: mol_type = other DNA
aatttcataacatcaccttctttattaaaaaaaattaatgaagtgagttt

SEQ ID NO: 63914 - DNA, 50 bp, synthetic construct
  source 1..50: mol_type = other DNA
cattagttttttcggggtttatattaccgaaaacgcttgaaaaaccagcc

SEQ ID NO: 63915 - DNA, 50 bp, synthetic construct
  source 1..50: mol_type = other DNA
gatcgaaaagtgaatagatagagcgagatctatcgcaggacaacggaata

SEQ ID NO: 63916 - DNA, 50 bp, synthetic construct
  source 1..50: mol_type = other DNA
gaggaatttaatcggatgatccagggctcggattatgccctaaatgactt

SEQ ID NO: 63917 - DNA, 50 bp, synthetic construct
  source 1..50: mol_type = other DNA
aattaatattaagtttgtttttcaaatatttaaatagattacaattaaaa

SEQ ID NO: 63918 - DNA, 50 bp, synthetic construct
  source 1..50: mol_type = other DNA
atatcacaaccggttctgaaagtccatggcttcagagaagattatgaatt

SEQ ID NO: 63919 - DNA, 50 bp, synthetic construct
  source 1..50: mol_type = other DNA
cagtaaacaactctttagagctattaataatgctcataagttatttgctc

SEQ ID NO: 63920 - DNA, 50 bp, synthetic construct
  source 1..50: mol_type = other DNA
gcatttgaattcttcacttgataaattttgcagcaagcaccggcaaaaca

SEQ ID NO: 63921 - DNA, 50 bp, synthetic construct
  source 1..50: mol_type = other DNA
tgcatcctcctttcgttttggtagtattatgtcaataaaataacctcgca

SEQ ID NO: 63922 - DNA, 50 bp, synthetic construct
  source 1..50: mol_type = other DNA
tttttcctgccagaaaatcctccagctggacacctgaaatgaaggaaaaa

SEQ ID NO: 63923 - DNA, 50 bp, synthetic construct
  source 1..50: mol_type = other DNA
cattcaggctttggaagccagagtgctggcgcatgccgtgcgcgcggcgc

SEQ ID NO: 63924 - DNA, 50 bp, synthetic construct
  source 1..50: mol_type = other DNA
tctattttatcatgtgggttcggtataccgacccactgaaccaaaatgag

SEQ ID NO: 63925 - DNA, 50 bp, synthetic construct
  source 1..50: mol_type = other DNA
atacccagctgcgcggccgcgccgagcaaggaggccggcctcgtgggaac

SEQ ID NO: 63926 - DNA, 50 bp, synthetic construct
  source 1..50: mol_type = other DNA
aagtttccttaaccggctcccgctttcccgtatgccggttatggaacggc

SEQ ID NO: 63927 - DNA, 50 bp, synthetic construct
  source 1..50: mol_type = other DNA
ataaaaaatgaacggcggctgcggtggggtttgaactctcgtaaatgcat

SEQ ID NO: 63928 - DNA, 50 bp, synthetic construct
  source 1..50: mol_type = other DNA
ggactatctttataaaaagcaaaagctttcggttgggtgaaagatgattt

SEQ ID NO: 63929 - DNA, 50 bp, synthetic construct
  source 1..50: mol_type = other DNA
atctcatctacattttaaatatgattacatattaaaaaaattaatggaaa

SEQ ID NO: 63930 - DNA, 50 bp, synthetic construct
  source 1..50: mol_type = other DNA
tcttggtatggatacacacggcctcccggcggtggaccggcacacaaagc

SEQ ID NO: 63931 - DNA, 50 bp, synthetic construct
  source 1..50: mol_type = other DNA
tctataaaaattgacaccgacataaatatgtaccacatattgtttaaaat

SEQ ID NO: 63932 - DNA, 50 bp, synthetic construct
  source 1..50: mol_type = other DNA
acatttatgacactcctatatattataatactagcaagtggattagatat

SEQ ID NO: 63933 - DNA, 50 bp, synthetic construct
  source 1..50: mol_type = other DNA
aacaggctcgtcatgctgtcgctccggtctgatttcatggtggcgctttt

SEQ ID NO: 63934 - DNA, 50 bp, synthetic construct
  source 1..50: mol_type = other DNA
tttaggcaaaccgacgattccagcttggtggaatcgttatttttcgtagt

SEQ ID NO: 63935 - DNA, 50 bp, synthetic construct
  source 1..50: mol_type = other DNA
gcagcaagcggaaacgccgcgttgcccattgcgccgcatctgctgttccc

SEQ ID NO: 63936 - DNA, 50 bp, synthetic construct
  source 1..50: mol_type = other DNA
cctccagatagtcctccattgctgatcaggactgctggacgccggagcga

SEQ ID NO: 63937 - DNA, 50 bp, synthetic construct
  source 1..50: mol_type = other DNA
gaccctcaaagtaaacttttgaaaccgtgaaaaagtgcacccaagcggaa

SEQ ID NO: 63938 - DNA, 50 bp, synthetic construct
  source 1..50: mol_type = other DNA
gcgccgcgataaggcctggcgtcaccccgcgacgcgccgcttcgcggtag

SEQ ID NO: 63939 - DNA, 50 bp, synthetic construct
  source 1..50: mol_type = other DNA
ttacgacaggaaaactaaaatcgtgcacatttttaatgttagtttactaa

SEQ ID NO: 63940 - DNA, 50 bp, synthetic construct
  source 1..50: mol_type = other DNA
tgtcgcgatcattaagcgacatataaatatcaacgacaacgggcgcggtt

SEQ ID NO: 63941 - DNA, 50 bp, synthetic construct
  source 1..50: mol_type = other DNA
ggctctgttctacacccttcaatcatgtgtaaaaacactggatatgttcc

SEQ ID NO: 63942 - DNA, 50 bp, synthetic construct
  source 1..50: mol_type = other DNA
gcggatcagcacaattatgaacgcggaaagacaacatcctgcagattgaa

SEQ ID NO: 63943 - DNA, 50 bp, synthetic construct
  source 1..50: mol_type = other DNA
cgattcaaaaccgcaagtttccgcttgacgagagatatgatttgatgaaa

SEQ ID NO: 63944 - DNA, 50 bp, synthetic construct
  source 1..50: mol_type = other DNA
cttttcgtactgttttggccattattgaatggagaaaagaacagataaaa

SEQ ID NO: 63945 - DNA, 50 bp, synthetic construct
  source 1..50: mol_type = other DNA
ggtggaaaaagacacaattctgtgataatttacttcatccctttgccaag

SEQ ID NO: 63946 - DNA, 50 bp, synthetic construct
  source 1..50: mol_type = other DNA
agtcaatttggcgaaataatgtacccgtgacgctgacagagaagttacag

SEQ ID NO: 63947 - DNA, 50 bp, synthetic construct
  source 1..50: mol_type = other DNA
tatatcactctgaaagccaataataggcggtgcggtttttgactgatata

SEQ ID NO: 63948 - DNA, 50 bp, synthetic construct
  source 1..50: mol_type = other DNA
cagtctcttaacattcttcactgatcttattgacgatacataagacactg

SEQ ID NO: 63949 - DNA, 50 bp, synthetic construct
  source 1..50: mol_type = other DNA
gttgcagcctacgcacgtgtttctacaagctcaccccggagcaggtcgac

SEQ ID NO: 63950 - DNA, 50 bp, synthetic construct
  source 1..50: mol_type = other DNA
tcggcgtaatcaagcaagctgcggtgccgaagcacaccgaggaacgcaag

SEQ ID NO: 63951 - DNA, 50 bp, synthetic construct
  source 1..50: mol_type = other DNA
actgcttatcaactgcaattatcccataaaagccctatactataagcaga

SEQ ID NO: 63952 - DNA, 50 bp, synthetic construct
  source 1..50: mol_type = other DNA
taaaaaaggaggagcatatagtaaatttataatcattaataagttttttt

SEQ ID NO: 63953 - DNA, 50 bp, synthetic construct
  source 1..50: mol_type = other DNA
actgataaaattgcaatataagagaaaatacctttttcaagagaacaagt

SEQ ID NO: 63954 - DNA, 50 bp, synthetic construct
  source 1..50: mol_type = other DNA
tgtgtgattcttaaaaattaggatataccgggctttttaagaggtaatat

SEQ ID NO: 63955 - DNA, 50 bp, synthetic construct
  source 1..50: mol_type = other DNA
ttgtttatctttatttataaacatatcaaactatatacaaagaaaaagtc

SEQ ID NO: 63956 - DNA, 50 bp, synthetic construct
  source 1..50: mol_type = other DNA
gaaaaatcttcagaaaaccacagataactgttgtgaggtgagcaaccgaa

SEQ ID NO: 63957 - DNA, 50 bp, synthetic construct
  source 1..50: mol_type = other DNA
atcagcgatatggtcaatgatgaaagatcatcattgatgccctgaagcat

SEQ ID NO: 63958 - DNA, 50 bp, synthetic construct
  source 1..50: mol_type = other DNA
cgatcaatgaaaagaaaaagcgccgcaccgcatcacctgatcactgatgg

SEQ ID NO: 63959 - DNA, 50 bp, synthetic construct
  source 1..50: mol_type = other DNA
aatcgttatcgtctctttctttcttaacaaaaaaagacacccgaccgcag

SEQ ID NO: 63960 - DNA, 50 bp, synthetic construct
  source 1..50: mol_type = other DNA
actatatatcactctttacgagccggtctttatcctcgctgatatacagt

SEQ ID NO: 63961 - DNA, 50 bp, synthetic construct
  source 1..50: mol_type = other DNA
tggctcatagtgttcggctatttcttgaacgctttcttcatcttgagcat

SEQ ID NO: 63962 - DNA, 50 bp, synthetic construct
  source 1..50: mol_type = other DNA
aaaagataaataatggctgaaaagtgcttttgtttgtatatttattctta

SEQ ID NO: 63963 - DNA, 50 bp, synthetic construct
  source 1..50: mol_type = other DNA
aatgaagaaaaaggaggcgatactatctaatcaccaatcctttctgtgaa

SEQ ID NO: 63964 - DNA, 50 bp, synthetic construct
  source 1..50: mol_type = other DNA
tgcaatttttggtttgttcattatatatggataaagttttaaatgatgct

SEQ ID NO: 63965 - DNA, 50 bp, synthetic construct
  source 1..50: mol_type = other DNA
ccttacaggtgcacctgttatgcgtcctcatatagggtatactatgtagt

SEQ ID NO: 63966 - DNA, 50 bp, synthetic construct
  source 1..50: mol_type = other DNA
tcccggcgtttggctgcttcctgttctgaaacggccaccagccgcacatc

SEQ ID NO: 63967 - DNA, 50 bp, synthetic construct
  source 1..50: mol_type = other DNA
tcagcagcatcagggacacgatgaggtcattggtccttctcctttctggt

SEQ ID NO: 63968 - DNA, 50 bp, synthetic construct
  source 1..50: mol_type = other DNA
ctctcaagctcagaaaatagagatattaaaagaatttcataaagaatata

SEQ ID NO: 63969 - DNA, 50 bp, synthetic construct
  source 1..50: mol_type = other DNA
ggaattaaaaggacgcacttgtttagaaaggagggcctccatttgagagt

SEQ ID NO: 63970 - DNA, 50 bp, synthetic construct
  source 1..50: mol_type = other DNA
tgcttcctccactaacgccttcgttattccagaagtaagtgaagggagga

SEQ ID NO: 63971 - DNA, 50 bp, synthetic construct
  source 1..50: mol_type = other DNA
gtagtgttcaccttatcctgagaatagtgtacatcgatgaagaacaagca

SEQ ID NO: 63972 - DNA, 50 bp, synthetic construct
  source 1..50: mol_type = other DNA
cgcgatgagcagcgtgttgccgacgcaagtccgccccgctgctcgacgct

SEQ ID NO: 63973 - DNA, 50 bp, synthetic construct
  source 1..50: mol_type = other DNA
caaaaggcggcgtctccgtgaatacgtcgcatcggaaacgccgctgttaa

SEQ ID NO: 63974 - DNA, 50 bp, synthetic construct
  source 1..50: mol_type = other DNA
aattataaactggaattatataaaagattatactgtaccagtttcagatc

SEQ ID NO: 63975 - DNA, 50 bp, synthetic construct
  source 1..50: mol_type = other DNA
atacaaccttaatttcgctcatatttttatacccttttttaagtatactc

SEQ ID NO: 63976 - DNA, 50 bp, synthetic construct
  source 1..50: mol_type = other DNA
attgttttggggaatgtcaaactgaactcgcctcatccagccaaaattcc

SEQ ID NO: 63977 - DNA, 50 bp, synthetic construct
  source 1..50: mol_type = other DNA
tccgcaaaaaagcggacttgtatttgctatctttctatctattttgcaaa

SEQ ID NO: 63978 - DNA, 50 bp, synthetic construct
  source 1..50: mol_type = other DNA
acacaatcatataatggaataacggaaagtatatacatataagagagtgt

SEQ ID NO: 63979 - DNA, 50 bp, synthetic construct
  source 1..50: mol_type = other DNA
aagctgatatatgcggagaaagaatcatcttcgggcagccatggcaagtg

SEQ ID NO: 63980 - DNA, 50 bp, synthetic construct
  source 1..50: mol_type = other DNA
aaactttaataatgatttccagaattgatttaaaaacaaacaaaaaacac

SEQ ID NO: 63981 - DNA, 50 bp, synthetic construct
  source 1..50: mol_type = other DNA
aatcaagccccgcttgatgtcccgcaaatacgttcaatcaaagcgcgatt

SEQ ID NO: 63982 - DNA, 50 bp, synthetic construct
  source 1..50: mol_type = other DNA
ttccgggcagactggattttcatgtttctaaaattccagtctgttgagat

SEQ ID NO: 63983 - DNA, 50 bp, synthetic construct
  source 1..50: mol_type = other DNA
tcttacatttcggacagtaaagaggaatccttagaaaacccaataaaaaa

SEQ ID NO: 63984 - DNA, 50 bp, synthetic construct
  source 1..50: mol_type = other DNA
gatgttcctgaaaaatacactttaaaaggagctgattttatgcgaacaat

SEQ ID NO: 63985 - DNA, 50 bp, synthetic construct
  source 1..50: mol_type = other DNA
ataaatttttaatttactattgaaaaataaatagaaaatagaaaagttgt

SEQ ID NO: 63986 - DNA, 50 bp, synthetic construct
  source 1..50: mol_type = other DNA
tatcgaatgctgtaaatatcaattttaaaaagtattgttttgattgtatg

SEQ ID NO: 63987 - DNA, 50 bp, synthetic construct
  source 1..50: mol_type = other DNA
taaattattagaggtgtatttatgataataaaagcacgttatataattta

SEQ ID NO: 63988 - DNA, 50 bp, synthetic construct
  source 1..50: mol_type = other DNA
ttgtccagaaatcctatatggaaaaatttttatgatggatttcgacacaa

SEQ ID NO: 63989 - DNA, 50 bp, synthetic construct
  source 1..50: mol_type = other DNA
ttaaattaattgaaatttaagaataaattttacaatttcagcttcttttt

SEQ ID NO: 63990 - DNA, 50 bp, synthetic construct
  source 1..50: mol_type = other DNA
ttctcagtcctgctcttcccttgcagccataacaagagcgaaatcatgaa

SEQ ID NO: 63991 - DNA, 50 bp, synthetic construct
  source 1..50: mol_type = other DNA
ccttttggtagtctatctatcactcttgtgcaatatacctaaccaaacat

SEQ ID NO: 63992 - DNA, 50 bp, synthetic construct
  source 1..50: mol_type = other DNA
accttctttctgtagataaccgaaaattctcttgatgatttaaagccggg

SEQ ID NO: 63993 - DNA, 50 bp, synthetic construct
  source 1..50: mol_type = other DNA
tgcccgaccccgcccatcactgctctaacggagatgaaaaatgtgcctct

SEQ ID NO: 63994 - DNA, 50 bp, synthetic construct
  source 1..50: mol_type = other DNA
ggcagagcctcaacaagcaccgggatagcggtaacgctgcgcgctagggt

SEQ ID NO: 63995 - DNA, 50 bp, synthetic construct
  source 1..50: mol_type = other DNA
tttttgttactatgagatgttccgttcggtacattttcaagatggcaaag

SEQ ID NO: 63996 - DNA, 50 bp, synthetic construct
  source 1..50: mol_type = other DNA
ttgtcaaccccttttttcaaaaaaattttttgcaaaaaaaatcagagcaa

SEQ ID NO: 63997 - DNA, 50 bp, synthetic construct
  source 1..50: mol_type = other DNA
tgatattcaacgaatgtcttcgccatgtcttacattttcgttaaatttca

SEQ ID NO: 63998 - DNA, 50 bp, synthetic construct
  source 1..50: mol_type = other DNA
cggcaattgcgaatattacgctcaattctgcggtcaaaccgtaatctcat

SEQ ID NO: 63999 - DNA, 50 bp, synthetic construct
  source 1..50: mol_type = other DNA
aaaataatgttagaacatttttttaaaaaaaattttggaaacggaatttt

SEQ ID NO: 64000 - DNA, 50 bp, synthetic construct
  source 1..50: mol_type = other DNA
ttatcagattcaatactaaaattatatattttttctatttaataataaaa

SEQ ID NO: 64001 - DNA, 50 bp, synthetic construct
  source 1..50: mol_type = other DNA
gtcagaataataagttgcatacctatattcctgcaaaaacatactctgaa

SEQ ID NO: 64002 - DNA, 50 bp, synthetic construct
  source 1..50: mol_type = other DNA
cacaatcctttcagtgaaaataggtttttatttttgaaatttcgattgaa

SEQ ID NO: 64003 - DNA, 50 bp, synthetic construct
  source 1..50: mol_type = other DNA
ggattataaaaaggaaatagaaaatatggttagtccacttattataatag

SEQ ID NO: 64004 - DNA, 50 bp, synthetic construct
  source 1..50: mol_type = other DNA
gaatatagatagcaacacgcatttataatcatagccacagatttataacc

SEQ ID NO: 64005 - DNA, 50 bp, synthetic construct
  source 1..50: mol_type = other DNA
gattaatttctttatcgcttgctaaatttggttattcaaaaaaattaagg

SEQ ID NO: 64006 - DNA, 50 bp, synthetic construct
  source 1..50: mol_type = other DNA
tttttttaagaatttggtatcaatttcaggatacaaaaattaaaattaaa

SEQ ID NO: 64007 - DNA, 50 bp, synthetic construct
  source 1..50: mol_type = other DNA
gaactcacggcctcttgaaccccattcaagcataaacggattttgagaaa

SEQ ID NO: 64008 - DNA, 50 bp, synthetic construct
  source 1..50: mol_type = other DNA
ataattatatactatttttcttcatatcaagtactatattatctagtctt

SEQ ID NO: 64009 - DNA, 50 bp, synthetic construct
  source 1..50: mol_type = other DNA
tcttctaaaaaggagaagttttacaatagaataaaaaggatgcagagtag

SEQ ID NO: 64010 - DNA, 50 bp, synthetic construct
  source 1..50: mol_type = other DNA
cccgacctgtccgacacaatgcgcaagcaaagaaaatcggtgcagtagat

SEQ ID NO: 64011 - DNA, 50 bp, synthetic construct
  source 1..50: mol_type = other DNA
cattcaagcgcgctaccaaaactgcgcatctccggcttgatgctgtcatg

SEQ ID NO: 64012 - DNA, 50 bp, synthetic construct
  source 1..50: mol_type = other DNA
ctcttatccttttttctttttgccgcgaacagcggcggaaaggagagatt

SEQ ID NO: 64013 - DNA, 50 bp, synthetic construct
  source 1..50: mol_type = other DNA
acggcaagccggtgctggcggaggaccttccggcaggatcgatctgccgg

SEQ ID NO: 64014 - DNA, 50 bp, synthetic construct
  source 1..50: mol_type = other DNA
tccgtcaggaggactttgccatgaaccgttcaaagtgtcctcctgcggga

SEQ ID NO: 64015 - DNA, 50 bp, synthetic construct
  source 1..50: mol_type = other DNA
gcgtataaaattttcgccgatgttgtcaatgcgaagacgagattcgggtt

SEQ ID NO: 64016 - DNA, 50 bp, synthetic construct
  source 1..50: mol_type = other DNA
tgggaggaaatctgccatggatgttgttaatgcaggcatttttgttgccg

SEQ ID NO: 64017 - DNA, 50 bp, synthetic construct
  source 1..50: mol_type = other DNA
gaagcataagggggcccggagggaagtcccccggggcccagcccttcacg

SEQ ID NO: 64018 - DNA, 50 bp, synthetic construct
  source 1..50: mol_type = other DNA
cttcggcaagcccaaaaacggaaaaaggcaagttttttcttttgcctatt

SEQ ID NO: 64019 - DNA, 50 bp, synthetic construct
  source 1..50: mol_type = other DNA
atagcaaacggtctctccactccgcccaaataggagtaaaaccttgctcg

SEQ ID NO: 64020 - DNA, 50 bp, synthetic construct
  source 1..50: mol_type = other DNA
gtgcagatcaatacacaaagatagaaagtaaatttgcttaaaggcaactc

SEQ ID NO: 64021 - DNA, 50 bp, synthetic construct
  source 1..50: mol_type = other DNA
ttaaattgagatgtaaatcaatacgtaaatttgcttaaaggcaactctcc

SEQ ID NO: 64022 - DNA, 50 bp, synthetic construct
  source 1..50: mol_type = other DNA
agagtcatttcttgaatgacagcacggcgaaaaacagttgaaaggacggc

SEQ ID NO: 64023 - DNA, 50 bp, synthetic construct
  source 1..50: mol_type = other DNA
aacaacaccatatagattttttgtacttaaaaaatagataaagtattttt

SEQ ID NO: 64024 - DNA, 50 bp, synthetic construct
  source 1..50: mol_type = other DNA
cgagcataggccgcttcactgccgcgcggaggttgtcggcgataagctgg

SEQ ID NO: 64025 - DNA, 50 bp, synthetic construct
  source 1..50: mol_type = other DNA
actctgtccggagcggcaacaggctttatcaaaaaaatcgcttacatagg

SEQ ID NO: 64026 - DNA, 50 bp, synthetic construct
  source 1..50: mol_type = other DNA
aaaaagctggtccttatacaccggtactctggcgtaaatacctactattt

SEQ ID NO: 64027 - DNA, 50 bp, synthetic construct
  source 1..50: mol_type = other DNA
cgcctggataggcagggatgggagcgctgctcaaagctatgatggagggt

SEQ ID NO: 64028 - DNA, 50 bp, synthetic construct
  source 1..50: mol_type = other DNA
acagcggagccggtgtcgctggtggaagaacagctacattcggacgctgc

SEQ ID NO: 64029 - DNA, 50 bp, synthetic construct
  source 1..50: mol_type = other DNA
tgttatattcacacaaaagaaaagagcctttgttatttatgactatcttt

SEQ ID NO: 64030 - DNA, 50 bp, synthetic construct
  source 1..50: mol_type = other DNA
gaaagataatcgaacacggaaagcagcctttccgtcaacgattatatatc

SEQ ID NO: 64031 - DNA, 50 bp, synthetic construct
  source 1..50: mol_type = other DNA
tcgtcgtcgacctttacgaaagcggcccctgccgtaaaggcgtatgctgt

SEQ ID NO: 64032 - DNA, 50 bp, synthetic construct
  source 1..50: mol_type = other DNA
ttaaaaggaaaggtatgatttttaaagaaaagttatacattcttccacct

SEQ ID NO: 64033 - DNA, 50 bp, synthetic construct
  source 1..50: mol_type = other DNA
gaagtgataggtttgatactaaaaattatttgtatcaaacttatccgtca

SEQ ID NO: 64034 - DNA, 50 bp, synthetic construct
  source 1..50: mol_type = other DNA
attagtcaagcataagtaaataaatgattacttacaaatgcctgatttaa

SEQ ID NO: 64035 - DNA, 50 bp, synthetic construct
  source 1..50: mol_type = other DNA
tatcattgccatacgcattaaagccataattaagcaaggaggcaatggtt

SEQ ID NO: 64036 - DNA, 50 bp, synthetic construct
  source 1..50: mol_type = other DNA
ataaacacaatggatgccaaaggagaaatccgttgatatataaggctttc

SEQ ID NO: 64037 - DNA, 50 bp, synthetic construct
  source 1..50: mol_type = other DNA
aaaataaaaaaattggttttatagaaatataaaatacaagtaattatttg

SEQ ID NO: 64038 - DNA, 50 bp, synthetic construct
  source 1..50: mol_type = other DNA
ataccgcatttcaagcaacgtaaaacgtttttttcctccaaatgttgttt

SEQ ID NO: 64039 - DNA, 50 bp, synthetic construct
  source 1..50: mol_type = other DNA
aacggctggtataagttctttcatatatttaagtactttgattattttgg

SEQ ID NO: 64040 - DNA, 50 bp, synthetic construct
  source 1..50: mol_type = other DNA
aaaaagagatgagctttgtaattcagaatatcataagctcatttcttatt

SEQ ID NO: 64041 - DNA, 50 bp, synthetic construct
  source 1..50: mol_type = other DNA
tgcaaggtggaagacctgtttgagacgcgggcataggctgccacgcggcg

SEQ ID NO: 64042 - DNA, 50 bp, synthetic construct
  source 1..50: mol_type = other DNA
tataaatattctgcttcaaggaaggcattcccttatgcagggcgcttgag

SEQ ID NO: 64043 - DNA, 50 bp, synthetic construct
  source 1..50: mol_type = other DNA
atagttctactaaaaatggcttaaaataaagagttttcgtatactactgc

SEQ ID NO: 64044 - DNA, 50 bp, synthetic construct
  source 1..50: mol_type = other DNA
cgaagggcaggcggaactggcggcgtctcgccatctgtgcctgctatatg

SEQ ID NO: 64045 - DNA, 50 bp, synthetic construct
  source 1..50: mol_type = other DNA
tatttaatgttaaatttcattcgctgacacaagatatgatgtttaaaatg

SEQ ID NO: 64046 - DNA, 50 bp, synthetic construct
  source 1..50: mol_type = other DNA
atttaatcattataaaaaatatttcaaaatatattgaataatgaaaatct

SEQ ID NO: 64047 - DNA, 50 bp, synthetic construct
  source 1..50: mol_type = other DNA
ttcacttggagatattaaaaccttaagaggtaatatgtgacctaacggaa

SEQ ID NO: 64048 - DNA, 50 bp, synthetic construct
  source 1..50: mol_type = other DNA
aattattataagcaccaacttaggagaatcaagtgccgcttattcaaaaa

SEQ ID NO: 64049 - DNA, 50 bp, synthetic construct
  source 1..50: mol_type = other DNA
tcaaagtgcattaaattttataaatgtttgcacaatttaagttacttgct

SEQ ID NO: 64050 - DNA, 50 bp, synthetic construct
  source 1..50: mol_type = other DNA
ttataaatagttttaatggacaagaatggtggttgaagaagaatttataa

SEQ ID NO: 64051 - DNA, 50 bp, synthetic construct
  source 1..50: mol_type = other DNA
aatatcctccattcccggaggttatcaatatgccgtgaatggttgaaata

SEQ ID NO: 64052 - DNA, 50 bp, synthetic construct
  source 1..50: mol_type = other DNA
taatatttttatcaggtttttgaatatagatagaaaagatgtaaaacttt

SEQ ID NO: 64053 - DNA, 50 bp, synthetic construct
  source 1..50: mol_type = other DNA
aagatgccagaatacaagcccttcaggtcgggcagttattctggcaagtc

SEQ ID NO: 64054 - DNA, 50 bp, synthetic construct
  source 1..50: mol_type = other DNA
caaattttgccttaaaatggtttgaaacaattggtttatttatttttttg

SEQ ID NO: 64055 - DNA, 50 bp, synthetic construct
  source 1..50: mol_type = other DNA
gattttatcaagtcatttggccgataatggcaaagatgtacaactttaat

SEQ ID NO: 64056 - DNA, 50 bp, synthetic construct
  source 1..50: mol_type = other DNA
ccttccgagaagctcctcctcattcacggcagtaggctgccacccttatc

SEQ ID NO: 64057 - DNA, 50 bp, synthetic construct
  source 1..50: mol_type = other DNA
cgattaatgcttaagtattaccaatatctgtaggttgcccttatttgttc

SEQ ID NO: 64058 - DNA, 50 bp, synthetic construct
  source 1..50: mol_type = other DNA
atatacgaattttgatatataaatttaagtatatattataaatttgatta

SEQ ID NO: 64059 - DNA, 50 bp, synthetic construct
  source 1..50: mol_type = other DNA
ggtgatgtaatcgatgaccacgaaggtctgccgtcaacgatcacatatcc

SEQ ID NO: 64060 - DNA, 50 bp, synthetic construct
  source 1..50: mol_type = other DNA
gccgcgctcgtccgtaccgcctttgaaaagccggtcaatccatctaccga

SEQ ID NO: 64061 - DNA, 50 bp, synthetic construct
  source 1..50: mol_type = other DNA
atgcttctcaccagcttcaatggcgcgccattgaaagaagtgtgcgccat

SEQ ID NO: 64062 - DNA, 50 bp, synthetic construct
  source 1..50: mol_type = other DNA
gatttgtggcagggtcaaaaaccggcaggcgttgaaacctgcggtctttt

SEQ ID NO: 64063 - DNA, 50 bp, synthetic construct
  source 1..50: mol_type = other DNA
ctactagatgcagaacttccgaggtagctatcctgaactggttatggtag

SEQ ID NO: 64064 - DNA, 50 bp, synthetic construct
  source 1..50: mol_type = other DNA
gaatggtacaatcacaagatagtgaaaatagtctgaaaggagtaccgtcc

SEQ ID NO: 64065 - DNA, 50 bp, synthetic construct
  source 1..50: mol_type = other DNA
gtacggcatgcgaatcttcctttacatattgacaggcaaatgaatagtat

SEQ ID NO: 64066 - DNA, 50 bp, synthetic construct
  source 1..50: mol_type = other DNA
aagaaaaactcaaatgtcatggaatacgacaggcatctggagtttgtttt

SEQ ID NO: 64067 - DNA, 50 bp, synthetic construct
  source 1..50: mol_type = other DNA
gatgcggacatgaggaccgtgtcgcccgccacaccgctcatgcccgagaa

SEQ ID NO: 64068 - DNA, 50 bp, synthetic construct
  source 1..50: mol_type = other DNA
cgataaaatactttttatcaattgataccccgataaaaaggaaagtatcg

SEQ ID NO: 64069 - DNA, 50 bp, synthetic construct
  source 1..50: mol_type = other DNA
ttacatatatcactctaaaagcccctggcctttgggtttgaaaatatccc

SEQ ID NO: 64070 - DNA, 50 bp, synthetic construct
  source 1..50: mol_type = other DNA
tgggccagcaccgcgtgccccaggaccgggacccacctcaacgggttcca

SEQ ID NO: 64071 - DNA, 50 bp, synthetic construct
  source 1..50: mol_type = other DNA
tccgttttctaagggctcttcataattattcctcggcaaagaaaaaagcc

SEQ ID NO: 64072 - DNA, 50 bp, synthetic construct
  source 1..50: mol_type = other DNA
acatattacctctgaaaccactatataataaaattaaagaaaagtgaaat

SEQ ID NO: 64073 - DNA, 50 bp, synthetic construct
  source 1..50: mol_type = other DNA
ctccggaacgccgcggcgagtttgtcatgaagctgcacgcggtaccggag

SEQ ID NO: 64074 - DNA, 50 bp, synthetic construct
  source 1..50: mol_type = other DNA
tctgccgctgagctataggcccaatatccccggaaaatccggtcggcgta

SEQ ID NO: 64075 - DNA, 50 bp, synthetic construct
  source 1..50: mol_type = other DNA
gtataaatatttgattaaaaaatgattgtttttcaacgttatctgtatac

SEQ ID NO: 64076 - DNA, 50 bp, synthetic construct
  source 1..50: mol_type = other DNA
gtttccaccctacataaataatggtcggattttctatgtactgtaaaaca

SEQ ID NO: 64077 - DNA, 50 bp, synthetic construct
  source 1..50: mol_type = other DNA
taattattgatatatacacgattatgaaagagtgtcagtatcaggtgtta

SEQ ID NO: 64078 - DNA, 50 bp, synthetic construct
  source 1..50: mol_type = other DNA
ttatatatgtatattatctcgtatttttttgatataatagttatattaca

SEQ ID NO: 64079 - DNA, 50 bp, synthetic construct
  source 1..50: mol_type = other DNA
ttctaatttgttgttttgctctgtcacaagaaaaaaattccaatcaagat

SEQ ID NO: 64080 - DNA, 50 bp, synthetic construct
  source 1..50: mol_type = other DNA
tttatcaagcaattcaggacattaatctttacccactaatactttatatt

SEQ ID NO: 64081 - DNA, 50 bp, synthetic construct
  source 1..50: mol_type = other DNA
tattttaccctccttcaacatagtttgatatgtgaaaacacggcaaaatt

SEQ ID NO: 64082 - DNA, 50 bp, synthetic construct
  source 1..50: mol_type = other DNA
aagttttagaatagctactgttattaatatcatcctctattataaatatc

SEQ ID NO: 64083 - DNA, 50 bp, synthetic construct
  source 1..50: mol_type = other DNA
cttctatataaaaaaagggggggatatccttatatttttttaattattta

SEQ ID NO: 64084 - DNA, 50 bp, synthetic construct
  source 1..50: mol_type = other DNA
cctatataaatcaacaaattcagcacaatgaattgcatcatttatatcct

SEQ ID NO: 64085 - DNA, 50 bp, synthetic construct
  source 1..50: mol_type = other DNA
ctattttttaatatatttattttttctgttccatatataaacaaaaaaac

SEQ ID NO: 64086 - DNA, 50 bp, synthetic construct
  source 1..50: mol_type = other DNA
gtggaggtatctccatgcaccagaattgaggtgataacatgtccaaatcc

SEQ ID NO: 64087 - DNA, 50 bp, synthetic construct
  source 1..50: mol_type = other DNA
ccatatattgcgctcctttaaaatatctaaaaagttttttctaaatcacg

SEQ ID NO: 64088 - DNA, 50 bp, synthetic construct
  source 1..50: mol_type = other DNA
cgccggggcggcgcttcgtttcaaatatataatgaatgacggccccgcgg

SEQ ID NO: 64089 - DNA, 50 bp, synthetic construct
  source 1..50: mol_type = other DNA
cttttttttctgagagccaatctgatgcctgcgtctcgacgaacaactta

SEQ ID NO: 64090 - DNA, 50 bp, synthetic construct
  source 1..50: mol_type = other DNA
tatatttttgaatatttcgatcaatattgcgcgagttggaggaaactata

SEQ ID NO: 64091 - DNA, 50 bp, synthetic construct
  source 1..50: mol_type = other DNA
gcagtctccgtacttcaagctatttaaataggtcgcattgtctggactgt

SEQ ID NO: 64092 - DNA, 50 bp, synthetic construct
  source 1..50: mol_type = other DNA
tccctccctgttttgctgtctgttcccccagaggcggaaacaacaaggag

SEQ ID NO: 64093 - DNA, 50 bp, synthetic construct
  source 1..50: mol_type = other DNA
cagtagatgattattttcaacagaagtttgtaaaatatcgaaatctacta

SEQ ID NO: 64094 - DNA, 50 bp, synthetic construct
  source 1..50: mol_type = other DNA
gtagcccatttaagatgtaacaacatgtacttttcaaagaaatcccttac

SEQ ID NO: 64095 - DNA, 50 bp, synthetic construct
  source 1..50: mol_type = other DNA
tgacgccaccctccaccgtttcgggccggtgctatttgattttgccgtca

SEQ ID NO: 64096 - DNA, 50 bp, synthetic construct
  source 1..50: mol_type = other DNA
aaaatcacagtgctgctctgcgtactatttcaaatcagctctgtaaactt

SEQ ID NO: 64097 - DNA, 50 bp, synthetic construct
  source 1..50: mol_type = other DNA
tacaggaaattatgcaataaaaaaagttcaagaattcagtttttgttgta

SEQ ID NO: 64098 - DNA, 50 bp, synthetic construct
  source 1..50: mol_type = other DNA
tcaatagggtgcgggaggtggtagatcaaacaaatccaagggcgtatttt

SEQ ID NO: 64099 - DNA, 50 bp, synthetic construct
  source 1..50: mol_type = other DNA
gttttgttttattcaatttatttgttcaactaaatcataggccttttgtt

SEQ ID NO: 64100 - DNA, 50 bp, synthetic construct
  source 1..50: mol_type = other DNA
gggaagaaagggcgggcgtcaccggcccatgacgcgcgcctccagctcct

SEQ ID NO: 64101 - DNA, 50 bp, synthetic construct
  source 1..50: mol_type = other DNA
tgatattgagtaaccatcaaagccctttattgaattgttcctcaatgttc

SEQ ID NO: 64102 - DNA, 50 bp, synthetic construct
  source 1..50: mol_type = other DNA
catcttttttaataaccctaacagatctgttaagttcattagccattcat

SEQ ID NO: 64103 - DNA, 50 bp, synthetic construct
  source 1..50: mol_type = other DNA
cgagaggccgatcgcggcgatcgcggttcatcgccgcgatcagctgcacc

SEQ ID NO: 64104 - DNA, 50 bp, synthetic construct
  source 1..50: mol_type = other DNA
gcaagtatataactacattcatatataaagaaacaagcgtatataaaaaa

SEQ ID NO: 64105 - DNA, 50 bp, synthetic construct
  source 1..50: mol_type = other DNA
ttttgataccttaaatagtaaaataattgttacaattagtgaaatcatca

SEQ ID NO: 64106 - DNA, 50 bp, synthetic construct
  source 1..50: mol_type = other DNA
cttatattaaattaggttcccaattaatttttcacaagttctgcaggaag

SEQ ID NO: 64107 - DNA, 50 bp, synthetic construct
  source 1..50: mol_type = other DNA
gtatttggaaagttttaaaacatctttgatttcacctcttttccatgtac

SEQ ID NO: 64108 - DNA, 50 bp, synthetic construct
  source 1..50: mol_type = other DNA
ttttaataaaattttataaaatcttgatattatataaccataagttaaaa

SEQ ID NO: 64109 - DNA, 50 bp, synthetic construct
  source 1..50: mol_type = other DNA
gcgtaataatttttagagagcattatcaactcctgttcactttcatttat

SEQ ID NO: 64110 - DNA, 50 bp, synthetic construct
  source 1..50: mol_type = other DNA
aaagtatcagaacaacatattagaacaacatattaatgttgggatacaaa

SEQ ID NO: 64111 - DNA, 50 bp, synthetic construct
  source 1..50: mol_type = other DNA
ttttatctttttgagaactttcctatttcaatgttgtcttaacttgtgaa

SEQ ID NO: 64112 - DNA, 50 bp, synthetic construct
  source 1..50: mol_type = other DNA
attattactatcacttgtctattattctctcctgaattgacatcaataat

SEQ ID NO: 64113 - DNA, 50 bp, synthetic construct
  source 1..50: mol_type = other DNA
ataaagattgagattaaagggtaaaactatcccttaatctatatctgccg

SEQ ID NO: 64114 - DNA, 50 bp, synthetic construct
  source 1..50: mol_type = other DNA
agtcttttaaggatagccaggctgtgctgattgggtatcgttcaaagact

SEQ ID NO: 64115 - DNA, 50 bp, synthetic construct
  source 1..50: mol_type = other DNA
tggtttctgtaatcccggccaaaccgtttttatgagaagaacaaagacga

SEQ ID NO: 64116 - DNA, 50 bp, synthetic construct
  source 1..50: mol_type = other DNA
gggaagcgatgccgttattcagaaatttttgaactgaaaaatggccttgc

SEQ ID NO: 64117 - DNA, 50 bp, synthetic construct
  source 1..50: mol_type = other DNA
attcattatcatctaagcgaaaccatggtttcgtcaaaaatacacggtat

SEQ ID NO: 64118 - DNA, 50 bp, synthetic construct
  source 1..50: mol_type = other DNA
tttcaaacaacaatgcgaacactcctgattgtaggagcgatttcctcatc

SEQ ID NO: 64119 - DNA, 50 bp, synthetic construct
  source 1..50: mol_type = other DNA
aagaggtacgctttctattggccttagagcgaatatgtcatataccgaaa

SEQ ID NO: 64120 - DNA, 50 bp, synthetic construct
  source 1..50: mol_type = other DNA
aaatcatcgtcttggttggcggttttaatcgcaaatccagaccttgccat

SEQ ID NO: 64121 - DNA, 50 bp, synthetic construct
  source 1..50: mol_type = other DNA
ggatttctggcgctcaatactggttctatccgatatcgcaaaagaaaacc

SEQ ID NO: 64122 - DNA, 50 bp, synthetic construct
  source 1..50: mol_type = other DNA
cgcctccagcatgtttggcttcactatttaaatcaagtctgcttttgaaa

SEQ ID NO: 64123 - DNA, 50 bp, synthetic construct
  source 1..50: mol_type = other DNA
attgttttattgttccctatttaactttaattgctgaaaatattgacaat

SEQ ID NO: 64124 - DNA, 50 bp, synthetic construct
  source 1..50: mol_type = other DNA
cgcttctctcatttcatctgtccaactggacagagtaaaaatgaagtacg

SEQ ID NO: 64125 - DNA, 50 bp, synthetic construct
  source 1..50: mol_type = other DNA
gtatatcctctattccggcgtttttgaaaggtgcgtaattgggtttatgg

SEQ ID NO: 64126 - DNA, 50 bp, synthetic construct
  source 1..50: mol_type = other DNA
ctagtattgctcgtttggataagtatgcttatacaaacaaaaaataaaag

SEQ ID NO: 64127 - DNA, 50 bp, synthetic construct
  source 1..50: mol_type = other DNA
tatcagaaagttctacgaagtatatatttcccgcgtacaaggtggctttt

SEQ ID NO: 64128 - DNA, 50 bp, synthetic construct
  source 1..50: mol_type = other DNA
ggatgtggaaagataaaagaataggtctatacttacttctttgaatatcc

SEQ ID NO: 64129 - DNA, 50 bp, synthetic construct
  source 1..50: mol_type = other DNA
aaagacttctgagcaggtaaaagaattgttgtagacccacagatatattt

SEQ ID NO: 64130 - DNA, 50 bp, synthetic construct
  source 1..50: mol_type = other DNA
tcattattactccttccttgtatgtatattcaagaggaaccgaattatct

SEQ ID NO: 64131 - DNA, 50 bp, synthetic construct
  source 1..50: mol_type = other DNA
tctttggaatttattaggcagatatttaattgctgaaaatattgacaatt

SEQ ID NO: 64132 - DNA, 50 bp, synthetic construct
  source 1..50: mol_type = other DNA
cagctatgtattcagcataagttatttaactttttgtaaatacataaaaa

SEQ ID NO: 64133 - DNA, 50 bp, synthetic construct
  source 1..50: mol_type = other DNA
ttatgataaatatgttaatgtaaatatagtaattaacctgtgcttcataa

SEQ ID NO: 64134 - DNA, 50 bp, synthetic construct
  source 1..50: mol_type = other DNA
cgaaggccagacccgcgcgccctcgggagggcggacggccgtgacccgcg

SEQ ID NO: 64135 - DNA, 50 bp, synthetic construct
  source 1..50: mol_type = other DNA
atgttttgggggcaagtgctactgttaagtatatattatttccataaaat

SEQ ID NO: 64136 - DNA, 50 bp, synthetic construct
  source 1..50: mol_type = other DNA
gaggatgtggaggccttcgttgaatctcctttttgggaccacacagacaa

SEQ ID NO: 64137 - DNA, 50 bp, synthetic construct
  source 1..50: mol_type = other DNA
ttaatatatatttatatgtaatgtatataatatatgcctatatatgttat

SEQ ID NO: 64138 - DNA, 50 bp, synthetic construct
  source 1..50: mol_type = other DNA
agtacggattgtacatccctctttataaagaggggaaagcaattttaact

SEQ ID NO: 64139 - DNA, 50 bp, synthetic construct
  source 1..50: mol_type = other DNA
ttctctataagtatgttatttcctttccattttaacatacttaattttta

SEQ ID NO: 64140 - DNA, 50 bp, synthetic construct
  source 1..50: mol_type = other DNA
gttaataagataaaatagtataattaaggggtatgtttttactttataat

SEQ ID NO: 64141 - DNA, 50 bp, synthetic construct
  source 1..50: mol_type = other DNA
gtagctgtacatttatctctttcaatttagagtgatgtatatacactgac

SEQ ID NO: 64142 - DNA, 50 bp, synthetic construct
  source 1..50: mol_type = other DNA
atggggagctaattttattttcctctaattttatataattagctgtccca

SEQ ID NO: 64143 - DNA, 50 bp, synthetic construct
  source 1..50: mol_type = other DNA
gtcattaaagtatgttgcaagaaaatttaaacccaggttaacttaaaata

SEQ ID NO: 64144 - DNA, 50 bp, synthetic construct
  source 1..50: mol_type = other DNA
ccgtgatgcaaacggctcagtggtaatatcttacctggttctcatagctt

SEQ ID NO: 64145 - DNA, 50 bp, synthetic construct
  source 1..50: mol_type = other DNA
ttttaaaaaatccgctgaaacccgcaaggtttctagcactcaatctaact

SEQ ID NO: 64146 - DNA, 50 bp, synthetic construct
  source 1..50: mol_type = other DNA
cttgttcagtagtaggaggcatttgacaattccccctcaacttaactaat

SEQ ID NO: 64147 - DNA, 50 bp, synthetic construct
  source 1..50: mol_type = other DNA
tcaattttgcttatttttctcattaaaatgatattaatatttataatgat

SEQ ID NO: 64148 - DNA, 50 bp, synthetic construct
  source 1..50: mol_type = other DNA
acttttttaaatgaaaggtattttatataataccttttgccttaaggaac

SEQ ID NO: 64149 - DNA, 50 bp, synthetic construct
  source 1..50: mol_type = other DNA
tttggtaaaaataatataataattataagttcaatcttatttttattaat

SEQ ID NO: 64150 - DNA, 50 bp, synthetic construct
  source 1..50: mol_type = other DNA
actccttttaataaatactacttgaagaaagagaatttattgcaaataga

SEQ ID NO: 64151 - DNA, 50 bp, synthetic construct
  source 1..50: mol_type = other DNA
gtaaagacttaaaaatattttattatattaaaatacaagaactatagtag

SEQ ID NO: 64152 - DNA, 50 bp, synthetic construct
  source 1..50: mol_type = other DNA
ctaagctcataccatctaattcaattcgttattgatattaatggtagtaa

SEQ ID NO: 64153 - DNA, 50 bp, synthetic construct
  source 1..50: mol_type = other DNA
ttttttccactcctattcatagtcatatgcaatcatgatggtgggaaaac

SEQ ID NO: 64154 - DNA, 50 bp, synthetic construct
  source 1..50: mol_type = other DNA
aacatgatgggtaatcaagtattttaaaagacttgataaataaggtcttt

SEQ ID NO: 64155 - DNA, 50 bp, synthetic construct
  source 1..50: mol_type = other DNA
gaagtcgatttttattaagaattatctacagtttaattgaaagcgaggtg

SEQ ID NO: 64156 - DNA, 50 bp, synthetic construct
  source 1..50: mol_type = other DNA
aaagccagagaagaaaaacgaaaacgtttttgtcagagattatgggctaa

SEQ ID NO: 64157 - DNA, 50 bp, synthetic construct
  source 1..50: mol_type = other DNA
attttatggaaataatatatacttaacggtagcacttgcccccaaaacat

SEQ ID NO: 64158 - DNA, 50 bp, synthetic construct
  source 1..50: mol_type = other DNA
cctttctctcagtttttatatgtttcatcattaagaacagtttgtaactg

SEQ ID NO: 64159 - DNA, 50 bp, synthetic construct
  source 1..50: mol_type = other DNA
tctgtgttgctttctaatgtaaatatagctccatcagctgtcagtacctt

SEQ ID NO: 64160 - DNA, 50 bp, synthetic construct
  source 1..50: mol_type = other DNA
aaagtctgaaaccctccccaaaaataccctcaagaagggtttcaacgcac

SEQ ID NO: 64161 - DNA, 50 bp, synthetic construct
  source 1..50: mol_type = other DNA
gcatatcttctttatgctccgcagattttgtatccatatggaatatatgc

SEQ ID NO: 64162 - DNA, 50 bp, synthetic construct
  source 1..50: mol_type = other DNA
aatccctgcgacctcttccgccggatcaaatagtagacttgtcagatttg

SEQ ID NO: 64163 - DNA, 50 bp, synthetic construct
  source 1..50: mol_type = other DNA
ttgggtacaaaaataacagctattgcaagtgatggcaaattgtaatgttg

SEQ ID NO: 64164 - DNA, 50 bp, synthetic construct
  source 1..50: mol_type = other DNA
attttatggaaataatatatacttaacggtagcacttgcccccaagacat

SEQ ID NO: 64165 - DNA, 50 bp, synthetic construct
  source 1..50: mol_type = other DNA
cggttaagtctgataaaatatgatatatgcaatgatataagatattacaa

SEQ ID NO: 64166 - DNA, 50 bp, synthetic construct
  source 1..50: mol_type = other DNA
tattattactttgtcaattctcttataagagatttatcaagttccttatt

SEQ ID NO: 64167 - DNA, 50 bp, synthetic construct
  source 1..50: mol_type = other DNA
atttcactgacgtttacattacctataggtaattattaatcctttaaaaa

SEQ ID NO: 64168 - DNA, 50 bp, synthetic construct
  source 1..50: mol_type = other DNA
caacccgtaggcatacttagcctgttcaataatcagatgcccatcatcat

SEQ ID NO: 64169 - DNA, 50 bp, synthetic construct
  source 1..50: mol_type = other DNA
tcccaaaatcatgactagcaaggactgcttttccgtctatgattttgtat

SEQ ID NO: 64170 - DNA, 50 bp, synthetic construct
  source 1..50: mol_type = other DNA
caaattgtaggcatattccgcctgcttcttacgagtatatgtacgattag

SEQ ID NO: 64171 - DNA, 50 bp, synthetic construct
  source 1..50: mol_type = other DNA
ctagaacaaagtatagtatccttggaaaataattcttttacttgttctgc

SEQ ID NO: 64172 - DNA, 50 bp, synthetic construct
  source 1..50: mol_type = other DNA
aggcttccaggcagcgcatggtgacggcactttcctcgacctgggcgccg

SEQ ID NO: 64173 - DNA, 50 bp, synthetic construct
  source 1..50: mol_type = other DNA
ttttattactatttattatttttcaagaaaagtaacaaagttaaataact

SEQ ID NO: 64174 - DNA, 50 bp, synthetic construct
  source 1..50: mol_type = other DNA
aaatatggtaaaatagaataaaaagtatttaatttagattttaattatag

SEQ ID NO: 64175 - DNA, 50 bp, synthetic construct
  source 1..50: mol_type = other DNA
ggatatttgttctaagctcataccatacaatatttatagaaaaggaattg

SEQ ID NO: 64176 - DNA, 50 bp, synthetic construct
  source 1..50: mol_type = other DNA
taattagcgaagccggagttttctatagaaagtacagtaaccattgattc

SEQ ID NO: 64177 - DNA, 50 bp, synthetic construct
  source 1..50: mol_type = other DNA
cagtaccttcagcattacgagataatcttcttcatttgttgaaactctgc

SEQ ID NO: 64178 - DNA, 50 bp, synthetic construct
  source 1..50: mol_type = other DNA
atgaaatctgccttgcgggtataacggacatcccggcaatttctttacat

SEQ ID NO: 64179 - DNA, 50 bp, synthetic construct
  source 1..50: mol_type = other DNA
caataaattccagaatttccatctttgtgtaataattcacctggttctca

SEQ ID NO: 64180 - DNA, 50 bp, synthetic construct
  source 1..50: mol_type = other DNA
tatgccttttaataccggcgacttcaacatctccaggattatttacatta

SEQ ID NO: 64181 - DNA, 50 bp, synthetic construct
  source 1..50: mol_type = other DNA
gaataccttgaggggaaaagcctagctgagattatgtcttaaatcacttg

SEQ ID NO: 64182 - DNA, 50 bp, synthetic construct
  source 1..50: mol_type = other DNA
ttttacatgatttatacatgtgatatttcaacccctgccttcatataaaa

SEQ ID NO: 64183 - DNA, 50 bp, synthetic construct
  source 1..50: mol_type = other DNA
taattagcgaaaccggagttttctatagaaagtacagtaatcattgattc

SEQ ID NO: 64184 - DNA, 50 bp, synthetic construct
  source 1..50: mol_type = other DNA
tagggtacaaaaataacagctattgcaagtgatgacagattgtaattgta

SEQ ID NO: 64185 - DNA, 50 bp, synthetic construct
  source 1..50: mol_type = other DNA
ggattttttatggaggaaagattaaataacactagctatatttaaattct

SEQ ID NO: 64186 - DNA, 50 bp, synthetic construct
  source 1..50: mol_type = other DNA
ttatgagatataaaggggttactgcttgaatatgaagttatatttcataa

SEQ ID NO: 64187 - DNA, 50 bp, synthetic construct
  source 1..50: mol_type = other DNA
gttggggtgcccgaaagcactggtcgaccgcccatttgtgtcctgcctgc

SEQ ID NO: 64188 - DNA, 50 bp, synthetic construct
  source 1..50: mol_type = other DNA
tcagtctaaatgcggtgttgtccacgcggagaacattatgaaaagggcta

SEQ ID NO: 64189 - DNA, 50 bp, synthetic construct
  source 1..50: mol_type = other DNA
aagaaaatacgctgcatgaatgggatatccttcttccaaatcgcgttctt

SEQ ID NO: 64190 - DNA, 50 bp, synthetic construct
  source 1..50: mol_type = other DNA
ctgtgattttttcagaggtaacacgcgtaaactcggaagggaatacacct

SEQ ID NO: 64191 - DNA, 50 bp, synthetic construct
  source 1..50: mol_type = other DNA
aatgctaccatcaaaaatggttgctgaatttcatctttctcggtaaggtt

SEQ ID NO: 64192 - DNA, 50 bp, synthetic construct
  source 1..50: mol_type = other DNA
gtttgcgtacttgttcatcatatgcagtgatgttgaagcagaacgtgaaa

SEQ ID NO: 64193 - DNA, 50 bp, synthetic construct
  source 1..50: mol_type = other DNA
cctgctgctgttcatcattggcctggaggtgctgcgcgagccgctggaga

SEQ ID NO: 64194 - DNA, 50 bp, synthetic construct
  source 1..50: mol_type = other DNA
ataagtgctatgatggcggcaataatgattattgtggtttgaaaagttcc

SEQ ID NO: 64195 - DNA, 50 bp, synthetic construct
  source 1..50: mol_type = other DNA
cgaggtgcagccggttcgggcggtcgaggtcaagaaccgactccatgtca

SEQ ID NO: 64196 - DNA, 50 bp, synthetic construct
  source 1..50: mol_type = other DNA
ccggataaaaatatttgcttatattaaaatgattgattattagtatctta

SEQ ID NO: 64197 - DNA, 50 bp, synthetic construct
  source 1..50: mol_type = other DNA
agcaaattgaaaaaggcaatctgcccaaggattggcgctttcaagtgcta

SEQ ID NO: 64198 - DNA, 50 bp, synthetic construct
  source 1..50: mol_type = other DNA
cgggttttcttgtttatgtctcatttgagagacacaaagaagggaagcca

SEQ ID NO: 64199 - DNA, 50 bp, synthetic construct
  source 1..50: mol_type = other DNA
gatcaaatcccgattaattcgccagattcatcatggataaaattttgtaa

SEQ ID NO: 64200 - DNA, 50 bp, synthetic construct
  source 1..50: mol_type = other DNA
gcgtaaagggcgacgcgggtcatggctgatcggcgcgccgaccttgccct

SEQ ID NO: 64201 - DNA, 50 bp, synthetic construct
  source 1..50: mol_type = other DNA
cgccgaggacttcgagggtttcctgaccctgctgggcgacaagctggggc

SEQ ID NO: 64202 - DNA, 50 bp, synthetic construct
  source 1..50: mol_type = other DNA
ggtatccctcgggtgccccaaggcttgccttgtggcaaaagcggtttaaa

SEQ ID NO: 64203 - DNA, 50 bp, synthetic construct
  source 1..50: mol_type = other DNA
atattatgtgatgatttctaaaaaagtttttagaggtgttttttaaactt

SEQ ID NO: 64204 - DNA, 50 bp, synthetic construct
  source 1..50: mol_type = other DNA
tttctatagaatctcttataatagttttatcataataaataatatagtat

SEQ ID NO: 64205 - DNA, 50 bp, synthetic construct
  source 1..50: mol_type = other DNA
tcttaatggtcaagcagctgatattagtttaaaattatttgatattatat

SEQ ID NO: 64206 - DNA, 50 bp, synthetic construct
  source 1..50: mol_type = other DNA
agaaaataatgagtataattgaaatatttgatttatatatagttctatca

SEQ ID NO: 64207 - DNA, 50 bp, synthetic construct
  source 1..50: mol_type = other DNA
tttattttgataccttccggccgcattaggaatttaggtatctttacatc

SEQ ID NO: 64208 - DNA, 50 bp, synthetic construct
  source 1..50: mol_type = other DNA
tccaatcgggtcgtgcagagacacatgtgtttcttacgttaccggcccca

SEQ ID NO: 64209 - DNA, 50 bp, synthetic construct
  source 1..50: mol_type = other DNA
tggaaaagaaattccaaccaagccagcagtttgtccgggattattttgaa

SEQ ID NO: 64210 - DNA, 50 bp, synthetic construct
  source 1..50: mol_type = other DNA
ccaactgggatgaatcttcctggttgctggggaacattcatataaggcag

SEQ ID NO: 64211 - DNA, 50 bp, synthetic construct
  source 1..50: mol_type = other DNA
attttaaaacctaattatagtaatataggtaattattaatcctttaaaaa

SEQ ID NO: 64212 - DNA, 50 bp, synthetic construct
  source 1..50: mol_type = other DNA
aaagaaagctatgggataagagtatataataaggctatccaagtttctta

SEQ ID NO: 64213 - DNA, 50 bp, synthetic construct
  source 1..50: mol_type = other DNA
attcttaagatgaaattctaaatgtggattttgtatttttacccatatta

SEQ ID NO: 64214 - DNA, 50 bp, synthetic construct
  source 1..50: mol_type = other DNA
gcaagttaattagcttgtgggaacattttttctgcttaaaattaactgta

SEQ ID NO: 64215 - DNA, 50 bp, synthetic construct
  source 1..50: mol_type = other DNA
tagatatttgttctaagctcataccaaaaagagaatagaaaaatcattta

SEQ ID NO: 64216 - DNA, 50 bp, synthetic construct
  source 1..50: mol_type = other DNA
caaatatgtattcctattgtaatgtacatgccaatatgaatattgtccgt

SEQ ID NO: 64217 - DNA, 50 bp, synthetic construct
  source 1..50: mol_type = other DNA
acaccatatggttatcgcatagaagattacagctattataacattggtga

SEQ ID NO: 64218 - DNA, 50 bp, synthetic construct
  source 1..50: mol_type = other DNA
gtatttatgtgtattggatagagtagactctggccattcttagaaaatta

SEQ ID NO: 64219 - DNA, 50 bp, synthetic construct
  source 1..50: mol_type = other DNA
cagagcatataatctgcacagtcctgatattaatatcattatactatcta

SEQ ID NO: 64220 - DNA, 50 bp, synthetic construct
  source 1..50: mol_type = other DNA
aatatccggattttcatggacagtcacttgtgctgcaatcccccggtatt

SEQ ID NO: 64221 - DNA, 50 bp, synthetic construct
  source 1..50: mol_type = other DNA
actggcggatatatgtaatgatgaatcaggtgcaggatatttccccgcac

SEQ ID NO: 64222 - DNA, 50 bp, synthetic construct
  source 1..50: mol_type = other DNA
ttctgaaaataaaaaagccgaataatcaaagcatatcttgccatcccgca

SEQ ID NO: 64223 - DNA, 50 bp, synthetic construct
  source 1..50: mol_type = other DNA
ttgtatcatatataaagcttttgttaacataagcagtaaattcattaaaa

SEQ ID NO: 64224 - DNA, 50 bp, synthetic construct
  source 1..50: mol_type = other DNA
gagccacttcatcggtgttatcagggttgataaatacaatggttattaaa

SEQ ID NO: 64225 - DNA, 50 bp, synthetic construct
  source 1..50: mol_type = other DNA
ttgtaccagaggttttgctttgaactcagatcgcaataaacatagttgct

SEQ ID NO: 64226 - DNA, 50 bp, synthetic construct
  source 1..50: mol_type = other DNA
tttgggtagtgacatattcccgtactatcaggttaactacatttccctga

SEQ ID NO: 64227 - DNA, 50 bp, synthetic construct
  source 1..50: mol_type = other DNA
atagccagattttatccaatcattttctggatgatctaaaatttggcttc

SEQ ID NO: 64228 - DNA, 50 bp, synthetic construct
  source 1..50: mol_type = other DNA
gtccttttgctgattgatgcgaattaatatgcaaaaaatattaaaagttg

SEQ ID NO: 64229 - DNA, 50 bp, synthetic construct
  source 1..50: mol_type = other DNA
acgatcaaataatttaattagtttacttgatagttaaataattttgtata

SEQ ID NO: 64230 - DNA, 50 bp, synthetic construct
  source 1..50: mol_type = other DNA
agaatataggttttttaatttgattgttaggggtaaaaaaattatataaa

SEQ ID NO: 64231 - DNA, 50 bp, synthetic construct
  source 1..50: mol_type = other DNA
aaaaaatgaacctgaagcataaatttccttatgatcatagttcatatcta

SEQ ID NO: 64232 - DNA, 50 bp, synthetic construct
  source 1..50: mol_type = other DNA
atgaaaaactatgtggaaaaaacatttgattattctttgtaacctatcat

SEQ ID NO: 64233 - DNA, 50 bp, synthetic construct
  source 1..50: mol_type = other DNA
gtgcagctataagtaactcttctgttccgatttgggattttggggagcga

SEQ ID NO: 64234 - DNA, 50 bp, synthetic construct
  source 1..50: mol_type = other DNA
aaccgccttggagccgcatgaagcggttgggccgctccagaaaggccgcc

SEQ ID NO: 64235 - DNA, 50 bp, synthetic construct
  source 1..50: mol_type = other DNA
atatcatctttttaatcaactcatccatgagtaacgcccaaagagaaatc

SEQ ID NO: 64236 - DNA, 50 bp, synthetic construct
  source 1..50: mol_type = other DNA
acatgggggctttgcatattcatggcggccacctaccaaatggcccacga

SEQ ID NO: 64237 - DNA, 50 bp, synthetic construct
  source 1..50: mol_type = other DNA
gccaacggtgctgagaatttcgtcgagattcgacactcctcaccaacgta

SEQ ID NO: 64238 - DNA, 50 bp, synthetic construct
  source 1..50: mol_type = other DNA
ccgaccacccgcgacatcagggactggtcgcggatgtcgcgggttcaagt

SEQ ID NO: 64239 - DNA, 50 bp, synthetic construct
  source 1..50: mol_type = other DNA
ggacgaggacgcggcggaatgcctcgcggcatcgagacgctgcgttacct

SEQ ID NO: 64240 - DNA, 50 bp, synthetic construct
  source 1..50: mol_type = other DNA
cacccaccatgcacctcgaccacggtgctgggcgcggcggatggcgggtt

SEQ ID NO: 64241 - DNA, 50 bp, synthetic construct
  source 1..50: mol_type = other DNA
actggtctcgtggtgctgatctgggccgacgccctcaccgagatggccgt

SEQ ID NO: 64242 - DNA, 50 bp, synthetic construct
  source 1..50: mol_type = other DNA
gtattcgggctcgccattgcgtgaaacgccgttttcatcgttgctcctat

SEQ ID NO: 64243 - DNA, 50 bp, synthetic construct
  source 1..50: mol_type = other DNA
taatagaagtcaagaaatataaaattctttatattactatactgctctgc

SEQ ID NO: 64244 - DNA, 50 bp, synthetic construct
  source 1..50: mol_type = other DNA
ttccaggggagtcggggccttcgtggaagaacaccccagcccctgacctg

SEQ ID NO: 64245 - DNA, 50 bp, synthetic construct
  source 1..50: mol_type = other DNA
cgagaggggtgcgtatatcgccgcctgaagcggcggcgagacgcgaccgt

SEQ ID NO: 64246 - DNA, 50 bp, synthetic construct
  source 1..50: mol_type = other DNA
tcgtaccggggcgacaggttccggggatcgaacgcctcaccccgcccgga

SEQ ID NO: 64247 - DNA, 50 bp, synthetic construct
  source 1..50: mol_type = other DNA
tttttaattatattatttaaggttttcaccatcaatgacataagtaatag

SEQ ID NO: 64248 - DNA, 50 bp, synthetic construct
  source 1..50: mol_type = other DNA
ttccgcgcaacatgttttcacctcaacaggtaaaaaaatgttgcgcggaa

SEQ ID NO: 64249 - DNA, 50 bp, synthetic construct
  source 1..50: mol_type = other DNA
tcgaggcgcgggccgcgcacgagcgcactctttgccggatcggcgatcac

SEQ ID NO: 64250 - DNA, 50 bp, synthetic construct
  source 1..50: mol_type = other DNA
cgcggccgtcgctggcggtcaccactggagatcgatcagcgcgaggtgcg

SEQ ID NO: 64251 - DNA, 50 bp, synthetic construct
  source 1..50: mol_type = other DNA
agcgcgtcgcgcacgtcaatgccgagaacatgcctcgcacgcgccgcgcc

SEQ ID NO: 64252 - DNA, 50 bp, synthetic construct
  source 1..50: mol_type = other DNA
cagtcctctggacaatagccacttttaattttttattgctcaaataacta

SEQ ID NO: 64253 - DNA, 50 bp, synthetic construct
  source 1..50: mol_type = other DNA
gcatttgtaccgtggagacgagtacatatatcgctacacgggttggttga

SEQ ID NO: 64254 - DNA, 50 bp, synthetic construct
  source 1..50: mol_type = other DNA
gttggcagacacaatgcaccctccctatccggtgcagcaagctacgacgt

SEQ ID NO: 64255 - DNA, 50 bp, synthetic construct
  source 1..50: mol_type = other DNA
gatcaaccgctgatagaacgccgccgatggtggtggatgggcgggcgaag

SEQ ID NO: 64256 - DNA, 50 bp, synthetic construct
  source 1..50: mol_type = other DNA
gtgggtgtgaatgctgttaccgctgccgcagtggcagcattcgcactgga

SEQ ID NO: 64257 - DNA, 50 bp, synthetic construct
  source 1..50: mol_type = other DNA
ggccgcgcgcgcgttcatccaggcggtgctcgacggcatcacgcgcgggt

SEQ ID NO: 64258 - DNA, 50 bp, synthetic construct
  source 1..50: mol_type = other DNA
gctttaaaaatggcttattcgatgaacaaaaaatcaacccgttttaaagg

SEQ ID NO: 64259 - DNA, 50 bp, synthetic construct
  source 1..50: mol_type = other DNA
ccgccccttctccaccatcacgctctcgcctggcgggccgaggggcgcgc

SEQ ID NO: 64260 - DNA, 50 bp, synthetic construct
  source 1..50: mol_type = other DNA
gaagatgaacaacgctctctttagccagggccacggcttcggccatcttc

SEQ ID NO: 64261 - DNA, 50 bp, synthetic construct
  source 1..50: mol_type = other DNA
ggtcgcgctgccggcggcgctcatcgacgatggccgccgtggccttcgcc

SEQ ID NO: 64262 - DNA, 50 bp, synthetic construct
  source 1..50: mol_type = other DNA
cgccgatgtgcaggcgggcgtcgagttcacccgtcgtttcaccatccttc

SEQ ID NO: 64263 - DNA, 50 bp, synthetic construct
  source 1..50: mol_type = other DNA
tccattgagctacgggcgcccggcccaggcgtcgcccgtattggcatggc

SEQ ID NO: 64264 - DNA, 50 bp, synthetic construct
  source 1..50: mol_type = other DNA
acgcgctaatacactcaaatcaagggccaggtggtcgggtacgtgcgcgt

SEQ ID NO: 64265 - DNA, 50 bp, synthetic construct
  source 1..50: mol_type = other DNA
aaggcaggtggagaacggatgcccccgcgagcaccgagtccacctgggtc

SEQ ID NO: 64266 - DNA, 50 bp, synthetic construct
  source 1..50: mol_type = other DNA
atgcgcctttaggtgtcccccgactcgtcgaggaacactaaaaggcgtac

SEQ ID NO: 64267 - DNA, 50 bp, synthetic construct
  source 1..50: mol_type = other DNA
cttttttatttgcatatagcttgtaaccatgctatatacaaaaagacgcg

SEQ ID NO: 64268 - DNA, 50 bp, synthetic construct
  source 1..50: mol_type = other DNA
gcggcatgagccgctcatcgacaaggccctcatcgaccggctccgtcgcc

SEQ ID NO: 64269 - DNA, 50 bp, synthetic construct
  source 1..50: mol_type = other DNA
gccgcacaccgaagaccggtgaccgcgggtgaccgtggtcgaggtgcatg

SEQ ID NO: 64270 - DNA, 50 bp, synthetic construct
  source 1..50: mol_type = other DNA
gtggttcataggcgcctccttaggtaggcaagcccgtgccgaaacggtta

SEQ ID NO: 64271 - DNA, 50 bp, synthetic construct
  source 1..50: mol_type = other DNA
gcccagcctggaaaccgccttccgcatcgaagccatggcccgcgcggacg

SEQ ID NO: 64272 - DNA, 50 bp, synthetic construct
  source 1..50: mol_type = other DNA
gcgaccgtgaccgcactcctcaaagcaccgcggagtacgcgatcgggatg

SEQ ID NO: 64273 - DNA, 50 bp, synthetic construct
  source 1..50: mol_type = other DNA
tctccttctcaatggcagattcaagggtgaacgagccattgcaggacttg

SEQ ID NO: 64274 - DNA, 50 bp, synthetic construct
  source 1..50: mol_type = other DNA
ggaccagcggccccgagctcgacgcctgccgtggaagctgccgaaggact

SEQ ID NO: 64275 - DNA, 50 bp, synthetic construct
  source 1..50: mol_type = other DNA
cgatctcggcattcactccgaaacagcttcaagaatgagaaatcgaatat

SEQ ID NO: 64276 - DNA, 50 bp, synthetic construct
  source 1..50: mol_type = other DNA
ggacaaggacgcgccggaaggcctcgcagcgtcgaggcgttgagtgacct

SEQ ID NO: 64277 - DNA, 50 bp, synthetic construct
  source 1..50: mol_type = other DNA
cggaagtgaatggggtttagacacaggtgtctaaacccagaatcgtttag

SEQ ID NO: 64278 - DNA, 50 bp, synthetic construct
  source 1..50: mol_type = other DNA
ataatgttttaatgcttatccagcttgctttaagagcagtaaccccttta

SEQ ID NO: 64279 - DNA, 50 bp, synthetic construct
  source 1..50: mol_type = other DNA
tttatgggttatcgaataatgatgatcatcaaatattacttttccatcta

SEQ ID NO: 64280 - DNA, 50 bp, synthetic construct
  source 1..50: mol_type = other DNA
acgcagctcgcacgcagactgctcagctcgaggtagcgggtgagctgctc

SEQ ID NO: 64281 - DNA, 50 bp, synthetic construct
  source 1..50: mol_type = other DNA
tgcccgcaataggtgtcctcatgcaaccggcaggacacctttagagcact

SEQ ID NO: 64282 - DNA, 50 bp, synthetic construct
  source 1..50: mol_type = other DNA
cgcgcggcggccacggtccagcagtagcgcgcgcacggcgccttggcgcc

SEQ ID NO: 64283 - DNA, 50 bp, synthetic construct
  source 1..50: mol_type = other DNA
attccaaatgctgtctgcttgttccggtgcgcttggacagtttttgcaac

SEQ ID NO: 64284 - DNA, 50 bp, synthetic construct
  source 1..50: mol_type = other DNA
ggcatctctcgctcgcggcttcgtcttcctggccgcgatcgatgacggcc

SEQ ID NO: 64285 - DNA, 50 bp, synthetic construct
  source 1..50: mol_type = other DNA
tgctcgtcggcgtggatggagtcggcggagaagagccatgacgacctcaa

SEQ ID NO: 64286 - DNA, 50 bp, synthetic construct
  source 1..50: mol_type = other DNA
gctcgcacgcccgaaccccgcgctcgcgccttttatcggggcgtgcgtga

SEQ ID NO: 64287 - DNA, 50 bp, synthetic construct
  source 1..50: mol_type = other DNA
gatcctcggcacagcatcaggggatccaaaacgatgctgaggaagccttc

SEQ ID NO: 64288 - DNA, 50 bp, synthetic construct
  source 1..50: mol_type = other DNA
cgtagccggggtgccatccgtcgctgaaccgttctggcacaacgtccctg

SEQ ID NO: 64289 - DNA, 50 bp, synthetic construct
  source 1..50: mol_type = other DNA
acagcgacagttcggcttcgcgctcgaggtcgaatccggagccgtgcttg

SEQ ID NO: 64290 - DNA, 50 bp, synthetic construct
  source 1..50: mol_type = other DNA
ggatgacggcgtcgagcagcaagccggtttgaaccgtcactccgtcacaa

SEQ ID NO: 64291 - DNA, 50 bp, synthetic construct
  source 1..50: mol_type = other DNA
gcgccgaacgactccggcgccgggcgacaggcgcagtcctcggcggcagc

SEQ ID NO: 64292 - DNA, 50 bp, synthetic construct
  source 1..50: mol_type = other DNA
attcatggaagcaatcaacataaagcaatatcgtgaatgtttgcaagagc

SEQ ID NO: 64293 - DNA, 50 bp, synthetic construct
  source 1..50: mol_type = other DNA
gtgaacgacgaggccgaggagtacgcggcgggctggtgcatcgcggtcga

SEQ ID NO: 64294 - DNA, 50 bp, synthetic construct
  source 1..50: mol_type = other DNA
gatacagcttgagcctaagaacattaaaattctcgaatttttcttatatt

SEQ ID NO: 64295 - DNA, 50 bp, synthetic construct
  source 1..50: mol_type = other DNA
ttcaatttatataaattaataaaatgattgatcagcttgaataaattgta

SEQ ID NO: 64296 - DNA, 50 bp, synthetic construct
  source 1..50: mol_type = other DNA
gctcccgcgccgccgcgctcgccgggcgccgagggcgagggcgcgaacgc

SEQ ID NO: 64297 - DNA, 50 bp, synthetic construct
  source 1..50: mol_type = other DNA
acgggttgtaccgcttttcaagaaacaatttcgttagcgggaaaaccaag

SEQ ID NO: 64298 - DNA, 50 bp, synthetic construct
  source 1..50: mol_type = other DNA
gcggtaattcattctactatattataattaaaaattgaattcgatagtga

SEQ ID NO: 64299 - DNA, 50 bp, synthetic construct
  source 1..50: mol_type = other DNA
ccgggcgcaccgggcccgtgatcgcccgccgccgagggcgatgcgcccga

SEQ ID NO: 64300 - DNA, 50 bp, synthetic construct
  source 1..50: mol_type = other DNA
ttatatatattatcataataacatatttgttgttgttctaatatatccaa

SEQ ID NO: 64301 - DNA, 50 bp, synthetic construct
  source 1..50: mol_type = other DNA
ctcctagggcaaaaacgaatccggatttaattggcgttttgccattggag

SEQ ID NO: 64302 - DNA, 50 bp, synthetic construct
  source 1..50: mol_type = other DNA
cttgtacattttaagactggaaatcaattagcataattaacttgtaatat

SEQ ID NO: 64303 - DNA, 50 bp, synthetic construct
  source 1..50: mol_type = other DNA
cttcttagtcactcacttatacattaatgtataagttataaacgagcaaa

SEQ ID NO: 64304 - DNA, 50 bp, synthetic construct
  source 1..50: mol_type = other DNA
acctaaagtaacggtaattcctgcaagcagcacttacgattagtgaaaag

SEQ ID NO: 64305 - DNA, 50 bp, synthetic construct
  source 1..50: mol_type = other DNA
agaaaaaaagcaattaatgaatatagatgatcgataattgagtatttacc

SEQ ID NO: 64306 - DNA, 50 bp, synthetic construct
  source 1..50: mol_type = other DNA
caattccttttctataaatattgtatggtatgagcttagaacaaatatct

SEQ ID NO: 64307 - DNA, 50 bp, synthetic construct
  source 1..50: mol_type = other DNA
aatccttctgtaaaaaataatgaaatttggggatatagctcagttgggat

SEQ ID NO: 64308 - DNA, 50 bp, synthetic construct
  source 1..50: mol_type = other DNA
gagttgaattccgtgggtttatatgattattaattcctgaaaaattcggc

SEQ ID NO: 64309 - DNA, 50 bp, synthetic construct
  source 1..50: mol_type = other DNA
gcagtattttaataaatgaaccagaggaggaagatcatggcaaagaaagt

SEQ ID NO: 64310 - DNA, 50 bp, synthetic construct
  source 1..50: mol_type = other DNA
actgctttttttttattcttttccatttataaagatggaagaatcctagt

SEQ ID NO: 64311 - DNA, 50 bp, synthetic construct
  source 1..50: mol_type = other DNA
aaaggaatctaaagaatggattgacacggctccatattttttattatatt

SEQ ID NO: 64312 - DNA, 50 bp, synthetic construct
  source 1..50: mol_type = other DNA
ggggttaaaccgttccctaaaatgatatcgttcaggtacaagaaaacacc

SEQ ID NO: 64313 - DNA, 50 bp, synthetic construct
  source 1..50: mol_type = other DNA
acatacactcacaggattataaaagtttttcggctccgccttgtgtaaat

SEQ ID NO: 64314 - DNA, 50 bp, synthetic construct
  source 1..50: mol_type = other DNA
tattgactatatttttggcggaagtaccgttttctattttatatccatag

SEQ ID NO: 64315 - DNA, 50 bp, synthetic construct
  source 1..50: mol_type = other DNA
atatctttccagatttccttttatttcgagatggaatgctcagctcatta

SEQ ID NO: 64316 - DNA, 50 bp, synthetic construct
  source 1..50: mol_type = other DNA
tccttggagaagagaatttcactaatttgtgaagttcaattaaaagagga

SEQ ID NO: 64317 - DNA, 50 bp, synthetic construct
  source 1..50: mol_type = other DNA
ttccgtcaatggatggaacgccatcaatggaattatatcattttcggaaa

SEQ ID NO: 64318 - DNA, 50 bp, synthetic construct
  source 1..50: mol_type = other DNA
cctatttatataactaaaaatggtgaagatgctaaacctatatataaacg

SEQ ID NO: 64319 - DNA, 50 bp, synthetic construct
  source 1..50: mol_type = other DNA
ctgacagaaaaatcttgtcattagatttcatcagcagacgagagtatgag

SEQ ID NO: 64320 - DNA, 50 bp, synthetic construct
  source 1..50: mol_type = other DNA
aagaaaacatttcttcattttttgttgaaaaaagccccagatggggctta

SEQ ID NO: 64321 - DNA, 50 bp, synthetic construct
  source 1..50: mol_type = other DNA
aaggcctcctttcacccgcaaatgcgctcgtgagccgccagctgggcctt

SEQ ID NO: 64322 - DNA, 50 bp, synthetic construct
  source 1..50: mol_type = other DNA
aataagttagattaatgtgtagaattttctacacatctatttggaatcat

SEQ ID NO: 64323 - DNA, 50 bp, synthetic construct
  source 1..50: mol_type = other DNA
tttaaaccgcttttgccacaaggcaagccttggggcacccgagggatacc

SEQ ID NO: 64324 - DNA, 50 bp, synthetic construct
  source 1..50: mol_type = other DNA
tcctcttttaattgaacttcacaaattagtgaaattctcttctccaagga

SEQ ID NO: 64325 - DNA, 50 bp, synthetic construct
  source 1..50: mol_type = other DNA
ctcataaataaaatccttatggcatttgagtatgatattttaaatttgaa

SEQ ID NO: 64326 - DNA, 50 bp, synthetic construct
  source 1..50: mol_type = other DNA
aatctgaaatttaggaaatacatcaagatgtatcaacccaattcaacatc

SEQ ID NO: 64327 - DNA, 50 bp, synthetic construct
  source 1..50: mol_type = other DNA
agtttatttttattgctccggtgaccgcagtacaggaaatccaatttacc

SEQ ID NO: 64328 - DNA, 50 bp, synthetic construct
  source 1..50: mol_type = other DNA
atggatatagaattgaagatggaaaattcctgaaacaagaatatacatgc

SEQ ID NO: 64329 - DNA, 50 bp, synthetic construct
  source 1..50: mol_type = other DNA
catgacccaaaaaatttgttttcaaatgataacttaacatttgtgtaaca

SEQ ID NO: 64330 - DNA, 50 bp, synthetic construct
  source 1..50: mol_type = other DNA
tataatgttttattataattatagaatatagattagaaaaactaatgaaa

SEQ ID NO: 64331 - DNA, 50 bp, synthetic construct
  source 1..50: mol_type = other DNA
ccaaaaaaccaacctcgtttaaccttgtagacctcataacgggtaagggc

SEQ ID NO: 64332 - DNA, 50 bp, synthetic construct
  source 1..50: mol_type = other DNA
ttgatgaagcaattcttataactttagggatataattttatatgtatcat

SEQ ID NO: 64333 - DNA, 50 bp, synthetic construct
  source 1..50: mol_type = other DNA
cattttcagggtcgggatgccgtccaagtggcttgaggacaatccgcaat

SEQ ID NO: 64334 - DNA, 50 bp, synthetic construct
  source 1..50: mol_type = other DNA
tgcgtcgcccgccggtcgccctctccgatgatcgacgagcgcttcaaacg

SEQ ID NO: 64335 - DNA, 50 bp, synthetic construct
  source 1..50: mol_type = other DNA
atgaaatccacgaaggtgatattgttaaaattcgtcttcatttatttaca

SEQ ID NO: 64336 - DNA, 50 bp, synthetic construct
  source 1..50: mol_type = other DNA
atgacttttccccctgctgcaatggcatattcataaatgggattctcatt

SEQ ID NO: 64337 - DNA, 50 bp, synthetic construct
  source 1..50: mol_type = other DNA
attgggattgtattttccaattctatactatctattaacaaaattgcaat

SEQ ID NO: 64338 - DNA, 50 bp, synthetic construct
  source 1..50: mol_type = other DNA
tgccagcaatagcatggtcagactatgccctcatccgcataagtacctgc

SEQ ID NO: 64339 - DNA, 50 bp, synthetic construct
  source 1..50: mol_type = other DNA
tatgtatacccccattcataagtcatgactgatgtattttctgatagatt

SEQ ID NO: 64340 - DNA, 50 bp, synthetic construct
  source 1..50: mol_type = other DNA
tttatacggcatatcatatctttgagaaaatatatagatctacacataaa

SEQ ID NO: 64341 - DNA, 50 bp, synthetic construct
  source 1..50: mol_type = other DNA
aacgcctcgtccattcagggctcgcgcccatcgggagggcggacggccat

SEQ ID NO: 64342 - DNA, 50 bp, synthetic construct
  source 1..50: mol_type = other DNA
aggtttttaatgccgttatcgcgcgcgatttgaaaccaacccggaattgc

SEQ ID NO: 64343 - DNA, 50 bp, synthetic construct
  source 1..50: mol_type = other DNA
tgttatgcacaaaaaggaatgaaagaacacctctctttttgttttagagt

SEQ ID NO: 64344 - DNA, 50 bp, synthetic construct
  source 1..50: mol_type = other DNA
tatttttgatgaagaaaatcggaatatatatgttttatatattgaatcaa

SEQ ID NO: 64345 - DNA, 50 bp, synthetic construct
  source 1..50: mol_type = other DNA
tgcgcttataaaagtgaaccgcacagagtaagttcaaacgatagagagca

SEQ ID NO: 64346 - DNA, 50 bp, synthetic construct
  source 1..50: mol_type = other DNA
cgcaacgcagcggcgattgcatttccgttctcaatacgatagccgtacgg

SEQ ID NO: 64347 - DNA, 50 bp, synthetic construct
  source 1..50: mol_type = other DNA
aagtagaactaatggaatatcgccacagcgatatacgatgccatataaag

SEQ ID NO: 64348 - DNA, 50 bp, synthetic construct
  source 1..50: mol_type = other DNA
caagataattcagccaggtatgcagctgattacttttttattatatcagc

SEQ ID NO: 64349 - DNA, 50 bp, synthetic construct
  source 1..50: mol_type = other DNA
tgtgccgttaagtccggtcatgaatcggcttctccggaaataacggcagt

SEQ ID NO: 64350 - DNA, 50 bp, synthetic construct
  source 1..50: mol_type = other DNA
ccgaaacgttttatataaattcagaggtgaaattgagctttgcgttgctg

SEQ ID NO: 64351 - DNA, 50 bp, synthetic construct
  source 1..50: mol_type = other DNA
gtccacgctccaccgctgtggtttgcaaccgtcccttgtgtcatttgtct

SEQ ID NO: 64352 - DNA, 50 bp, synthetic construct
  source 1..50: mol_type = other DNA
tttcttgtgttatatttcaactcacaagtgtgtgaatataataaaagaaa

SEQ ID NO: 64353 - DNA, 50 bp, synthetic construct
  source 1..50: mol_type = other DNA
attatttcagataatttatttcagtagccaaagggtgtatggccaatcta

SEQ ID NO: 64354 - DNA, 50 bp, synthetic construct
  source 1..50: mol_type = other DNA
agaagcttctatcgttcctaaagtatgctttcagcctgaaagaaggtaag

SEQ ID NO: 64355 - DNA, 50 bp, synthetic construct
  source 1..50: mol_type = other DNA
tgtcattataataacgtaatcgactatcaaaaaaaaccatttgtctgcgg

SEQ ID NO: 64356 - DNA, 50 bp, synthetic construct
  source 1..50: mol_type = other DNA
tcataacaatggacgagttcaaacttttttgaatggagttgataaaatgc

SEQ ID NO: 64357 - DNA, 50 bp, synthetic construct
  source 1..50: mol_type = other DNA
tgaactcaccgttgaggtacttgcaatggaactgctaaactatgctttca

SEQ ID NO: 64358 - DNA, 50 bp, synthetic construct
  source 1..50: mol_type = other DNA
ctttcgcaagctgctccggcgtaccggtcttttcatttttgttgggactc

SEQ ID NO: 64359 - DNA, 50 bp, synthetic construct
  source 1..50: mol_type = other DNA
ctgttttattgtcccaaccttattttgtcctagtttggacaataaaacac

SEQ ID NO: 64360 - DNA, 50 bp, synthetic construct
  source 1..50: mol_type = other DNA
actttggctgcgtgagcggtctttccaaatgccgccatagctggtaaagc

SEQ ID NO: 64361 - DNA, 50 bp, synthetic construct
  source 1..50: mol_type = other DNA
ggctgtcctcaaaagcagcagatgcggcgacacgtcttttccgtgcagcc

SEQ ID NO: 64362 - DNA, 50 bp, synthetic construct
  source 1..50: mol_type = other DNA
ttttcataaaaaatatgtgctgcaccgcaagggtttattttttatactct

SEQ ID NO: 64363 - DNA, 50 bp, synthetic construct
  source 1..50: mol_type = other DNA
tttgactgtttcatacagccctccttttgcgggggcgtcttttcggcccc

SEQ ID NO: 64364 - DNA, 50 bp, synthetic construct
  source 1..50: mol_type = other DNA
tataagatgaaatatttttcttgttagtatgaaaaataagtgtattttat

SEQ ID NO: 64365 - DNA, 50 bp, synthetic construct
  source 1..50: mol_type = other DNA
cggtttctttcatctttttcagttacgatcaccagcagtgcaatcaccag

SEQ ID NO: 64366 - DNA, 50 bp, synthetic construct
  source 1..50: mol_type = other DNA
tttttatgctcgaataaagaattttaaaactccctataacttccacaaaa

SEQ ID NO: 64367 - DNA, 50 bp, synthetic construct
  source 1..50: mol_type = other DNA
cgtatcactctccttttgtaaaatataatttgcatctcattccattcttt

SEQ ID NO: 64368 - DNA, 50 bp, synthetic construct
  source 1..50: mol_type = other DNA
aagcagccaccttaagtttcttctcacgaagaaaggcaatctggtctgga

SEQ ID NO: 64369 - DNA, 50 bp, synthetic construct
  source 1..50: mol_type = other DNA
ggtgcttttcttttactcaggaaggataaagcgaggtgatataagtgaag

SEQ ID NO: 64370 - DNA, 50 bp, synthetic construct
  source 1..50: mol_type = other DNA
ttttttgtagcttcaaacattctgtcatttaggttcaagcctgcagaact

SEQ ID NO: 64371 - DNA, 50 bp, synthetic construct
  source 1..50: mol_type = other DNA
tgtcgccggttatgcccgcgtctccagagccgccgcttgaaggacacgca

SEQ ID NO: 64372 - DNA, 50 bp, synthetic construct
  source 1..50: mol_type = other DNA
aggaacaccggcccggtctttacagcatgaaaccctggaaaaaagcagct

SEQ ID NO: 64373 - DNA, 50 bp, synthetic construct
  source 1..50: mol_type = other DNA
agtatttattttaaatgatattaattaaaataagacgtaattcctattgc

SEQ ID NO: 64374 - DNA, 50 bp, synthetic construct
  source 1..50: mol_type = other DNA
aaagaacttaagatctggcggtgatgggaggtgagacgatgaggttcttt

SEQ ID NO: 64375 - DNA, 50 bp, synthetic construct
  source 1..50: mol_type = other DNA
caaattcgataggatatagctaaaaacatagaaagccgggagcgatttcc

SEQ ID NO: 64376 - DNA, 50 bp, synthetic construct
  source 1..50: mol_type = other DNA
tataaaagtcttttatattcttgtgggagaaatcaaaaaagatatttata

SEQ ID NO: 64377 - DNA, 50 bp, synthetic construct
  source 1..50: mol_type = other DNA
aatagtcctgtgagctcctgtgtgcccacacagcggctaccgcaaatgca

SEQ ID NO: 64378 - DNA, 50 bp, synthetic construct
  source 1..50: mol_type = other DNA
tgttcaaaagaacagaacactttttctgaggtacgcggagtttatgaacc

SEQ ID NO: 64379 - DNA, 50 bp, synthetic construct
  source 1..50: mol_type = other DNA
atcatcccggcgttgaaagaccaacttcccgctgagaaagcaaatggaac

SEQ ID NO: 64380 - DNA, 50 bp, synthetic construct
  source 1..50: mol_type = other DNA
aaacattgtagtcacggtttcatccatataaagaggtgaccgcaacactt

SEQ ID NO: 64381 - DNA, 50 bp, synthetic construct
  source 1..50: mol_type = other DNA
ctgaaaagcaactgcacagatgattttcgcactgtaacgacttgtttgag

SEQ ID NO: 64382 - DNA, 50 bp, synthetic construct
  source 1..50: mol_type = other DNA
tacgttccgcttgcgcgactgctccgtgtatatttataataagtaaaaat

SEQ ID NO: 64383 - DNA, 50 bp, synthetic construct
  source 1..50: mol_type = other DNA
tacaaaaaataagtgcaactgtgttaccaatcatgcgtttctttgggcga

SEQ ID NO: 64384 - DNA, 50 bp, synthetic construct
  source 1..50: mol_type = other DNA
tctaatcatattataaaagggtataaaaaagattttatgatatagtaaag

SEQ ID NO: 64385 - DNA, 50 bp, synthetic construct
  source 1..50: mol_type = other DNA
cggaaataaaaggatgaatgttgacaggctttttcttccatttcttttcc

SEQ ID NO: 64386 - DNA, 50 bp, synthetic construct
  source 1..50: mol_type = other DNA
cggcttttttgtattgtgaaactaaattgttgcggaaaacagaaaagcgc

SEQ ID NO: 64387 - DNA, 50 bp, synthetic construct
  source 1..50: mol_type = other DNA
tgctctggacaggttttatccctgtacagcaaggcagacatcccggaaca

SEQ ID NO: 64388 - DNA, 50 bp, synthetic construct
  source 1..50: mol_type = other DNA
acgaagatatatgatgaattgacatagagagggaaacaaccatggaaaat

SEQ ID NO: 64389 - DNA, 50 bp, synthetic construct
  source 1..50: mol_type = other DNA
gctttttgtacgtggcgggtcattcgcccaatgcgttacggcattcaagg

SEQ ID NO: 64390 - DNA, 50 bp, synthetic construct
  source 1..50: mol_type = other DNA
ttcgctttattatatggtgcgggacccatcccatcacatcctttccctga

SEQ ID NO: 64391 - DNA, 50 bp, synthetic construct
  source 1..50: mol_type = other DNA
atctgccttctcatcaaaatgcacccacaagctcatctgaacctgcagga

SEQ ID NO: 64392 - DNA, 50 bp, synthetic construct
  source 1..50: mol_type = other DNA
ggatgcggccatgatcagcctccagaaaggagctgattctatgcggacta

SEQ ID NO: 64393 - DNA, 50 bp, synthetic construct
  source 1..50: mol_type = other DNA
tacggcagagaatccaagaggaaacgtgtacgcagaatatctctaccagg

SEQ ID NO: 64394 - DNA, 50 bp, synthetic construct
  source 1..50: mol_type = other DNA
acattataacctacatcatttatgggcaataatcataatcatcataatct

SEQ ID NO: 64395 - DNA, 50 bp, synthetic construct
  source 1..50: mol_type = other DNA
aatggaagacctgccaaaatctgtatgcttactttgaaaggtcttttgat

SEQ ID NO: 64396 - DNA, 50 bp, synthetic construct
  source 1..50: mol_type = other DNA
ctcttggtgtgattttatttgacaaagatcataaaaaatcagctccttat

SEQ ID NO: 64397 - DNA, 50 bp, synthetic construct
  source 1..50: mol_type = other DNA
ttttttccagaaaaagaagcagtttaatcagcctattagtggaagcaaaa

SEQ ID NO: 64398 - DNA, 50 bp, synthetic construct
  source 1..50: mol_type = other DNA
attctatattttattcgtatcggtgttcctgtcaggataaaatatagaac

SEQ ID NO: 64399 - DNA, 50 bp, synthetic construct
  source 1..50: mol_type = other DNA
ctctgcgtctttgcgtctggctctttgatagagtggaaaaagtatcagat

SEQ ID NO: 64400 - DNA, 50 bp, synthetic construct
  source 1..50: mol_type = other DNA
acaaccccgtgaatgttgaaaccatgaagacgggaaattctcctggccgt

SEQ ID NO: 64401 - DNA, 50 bp, synthetic construct
  source 1..50: mol_type = other DNA
cacttttttgatttttttcaaaaaatgttctcgaaaagaaataattctat

SEQ ID NO: 64402 - DNA, 50 bp, synthetic construct
  source 1..50: mol_type = other DNA
ataaaaatgtgcgaattttctaccatttacgaaaaacatcagttttttac

SEQ ID NO: 64403 - DNA, 50 bp, synthetic construct
  source 1..50: mol_type = other DNA
tacgcaatatcatcaaatttcaaaatttcattgtaccatgatcctgctca

SEQ ID NO: 64404 - DNA, 50 bp, synthetic construct
  source 1..50: mol_type = other DNA
ctttccattttggattgtgcgggcatcgaactataatacaaccaaagatt

SEQ ID NO: 64405 - DNA, 50 bp, synthetic construct
  source 1..50: mol_type = other DNA
tatagttatcctgtttagccatactcattaggataaacaggataactata

SEQ ID NO: 64406 - DNA, 50 bp, synthetic construct
  source 1..50: mol_type = other DNA
ggtgtaagaagcaaatccttgtttaccatacacttcggctatctctcttt

SEQ ID NO: 64407 - DNA, 50 bp, synthetic construct
  source 1..50: mol_type = other DNA
gtttttaatagcaagtacagattcttgatcctgtatttgctccataactg

SEQ ID NO: 64408 - DNA, 50 bp, synthetic construct
  source 1..50: mol_type = other DNA
atccttcgttgctgtttgagtgtaaccaacaataaaacgcccggatcatc

SEQ ID NO: 64409 - DNA, 50 bp, synthetic construct
  source 1..50: mol_type = other DNA
caggaagagcagatgaaataagctctgccgccactccgctgtcatagtct

SEQ ID NO: 64410 - DNA, 50 bp, synthetic construct
  source 1..50: mol_type = other DNA
tgcgtagataaaataagacattgtatgcactggcttatttcgaaaaatac

SEQ ID NO: 64411 - DNA, 50 bp, synthetic construct
  source 1..50: mol_type = other DNA
tgttttctttttcttacgcaaggtaaaggtgaaaggtatcaaagaaaaca

SEQ ID NO: 64412 - DNA, 50 bp, synthetic construct
  source 1..50: mol_type = other DNA
agaagaaaattcaactgcttttccagaaaaaagaagtgcagttttatcgt

SEQ ID NO: 64413 - DNA, 50 bp, synthetic construct
  source 1..50: mol_type = other DNA
acacaagggtttgtaaatgaatgtgtggatatgtttccaaacacggttca

SEQ ID NO: 64414 - DNA, 50 bp, synthetic construct
  source 1..50: mol_type = other DNA
atcgttccacgttccgttgaatacgcctatgcgctatactttggaaaaat

SEQ ID NO: 64415 - DNA, 50 bp, synthetic construct
  source 1..50: mol_type = other DNA
ttatgctttgaggctcacttttttataaaaaagcgaaataccaaaaatgg

SEQ ID NO: 64416 - DNA, 50 bp, synthetic construct
  source 1..50: mol_type = other DNA
ggatatttgttgtggctcatcactcaaggtatggcaaaaagaaaattcaa

SEQ ID NO: 64417 - DNA, 50 bp, synthetic construct
  source 1..50: mol_type = other DNA
tgataaaataaaagctctgttaaaaatttgaaagggcttattttttacgc

SEQ ID NO: 64418 - DNA, 50 bp, synthetic construct
  source 1..50: mol_type = other DNA
gtgatggcgaccgtagcaagaaggatcggtctgatggcgaatgctggtat

SEQ ID NO: 64419 - DNA, 50 bp, synthetic construct
  source 1..50: mol_type = other DNA
gttgctcactgtccattcgtgacgcctggctggaacggaaaggaggcaaa

SEQ ID NO: 64420 - DNA, 50 bp, synthetic construct
  source 1..50: mol_type = other DNA
gctcatcagcaaatataaccgccggatggctattattgatgctgatatgt

SEQ ID NO: 64421 - DNA, 50 bp, synthetic construct
  source 1..50: mol_type = other DNA
cttcgtatgtgataagtcactctaaacagagtgatgtatagtagcgaaag

SEQ ID NO: 64422 - DNA, 50 bp, synthetic construct
  source 1..50: mol_type = other DNA
attaattttttcttatacataagaagtcaaaagaaatagaaaaaaatcta

SEQ ID NO: 64423 - DNA, 50 bp, synthetic construct
  source 1..50: mol_type = other DNA
accgcatggacattcagaccgtgcttattcggtctgaatgatgatgaggt

SEQ ID NO: 64424 - DNA, 50 bp, synthetic construct
  source 1..50: mol_type = other DNA
gaacgcctgctcctcggcagcgccgaggcgctgctgcgtctatgggatta

SEQ ID NO: 64425 - DNA, 50 bp, synthetic construct
  source 1..50: mol_type = other DNA
tctctactgttttcaatgaaattcctcaagttatcattccagcatagaga

SEQ ID NO: 64426 - DNA, 50 bp, synthetic construct
  source 1..50: mol_type = other DNA
catgcgtagacctccagaaaataatcgatggaggtggatttgccaaaaga

SEQ ID NO: 64427 - DNA, 50 bp, synthetic construct
  source 1..50: mol_type = other DNA
tacttagttcacatacggcatgtatttatccgggatacagctttaaggtg

SEQ ID NO: 64428 - DNA, 50 bp, synthetic construct
  source 1..50: mol_type = other DNA
tccattaaattcataagaaaaaggaacttcccgctgagaaagcaaatgga

SEQ ID NO: 64429 - DNA, 50 bp, synthetic construct
  source 1..50: mol_type = other DNA
atcaaaaaggaatacaacacattacatatatggtcttaaaacttttggta

SEQ ID NO: 64430 - DNA, 50 bp, synthetic construct
  source 1..50: mol_type = other DNA
gcgaagcaatccgcggacgcggtctgatctacgcccgcggtttgctggac

SEQ ID NO: 64431 - DNA, 50 bp, synthetic construct
  source 1..50: mol_type = other DNA
catcccaatgcctatgcagcaagggtaacctctgcatttagcttctgcaa

SEQ ID NO: 64432 - DNA, 50 bp, synthetic construct
  source 1..50: mol_type = other DNA
acctggagaactactacaactatgtggagaccagatacagaaattgccag

SEQ ID NO: 64433 - DNA, 50 bp, synthetic construct
  source 1..50: mol_type = other DNA
tgaagccagtcaacgccatggaagatctgacatggggttatagctcagct

SEQ ID NO: 64434 - DNA, 50 bp, synthetic construct
  source 1..50: mol_type = other DNA
atttaaaaatatatatagatgatttaaataatcaaaagatatattgtaat

SEQ ID NO: 64435 - DNA, 50 bp, synthetic construct
  source 1..50: mol_type = other DNA
ccttgctggggttcttcttttttgtacaacactacccaaaaacaacaccc

SEQ ID NO: 64436 - DNA, 50 bp, synthetic construct
  source 1..50: mol_type = other DNA
tcgaactggaaaagttgagccacgtccgggtggacagctctcccttttta

SEQ ID NO: 64437 - DNA, 50 bp, synthetic construct
  source 1..50: mol_type = other DNA
cgggtagaattttcgccaaaaaagataaaacttggcgaaaatctgcactg

SEQ ID NO: 64438 - DNA, 50 bp, synthetic construct
  source 1..50: mol_type = other DNA
tttatcgataatttttcaaaaagtattatttaattctgtttcctccaaat

SEQ ID NO: 64439 - DNA, 50 bp, synthetic construct
  source 1..50: mol_type = other DNA
gtccagcaaaccgcgggcgtagatcagaccacgtccgcggattgctttgc

SEQ ID NO: 64440 - DNA, 50 bp, synthetic construct
  source 1..50: mol_type = other DNA
ttatccctggtctaaaccaactatctattataaacttacaccataatctc

SEQ ID NO: 64441 - DNA, 50 bp, synthetic construct
  source 1..50: mol_type = other DNA
ggcttcccatctcgacaatctcgccggctagattctcttgatattgtctg

SEQ ID NO: 64442 - DNA, 50 bp, synthetic construct
  source 1..50: mol_type = other DNA
ttgtgcatcaaactatagtaaatcaaaagcgagtgtattttcatagtcac

SEQ ID NO: 64443 - DNA, 50 bp, synthetic construct
  source 1..50: mol_type = other DNA
atatggttataaaaacggaaaactgattttctccgttcccaccagcagaa

SEQ ID NO: 64444 - DNA, 50 bp, synthetic construct
  source 1..50: mol_type = other DNA
gcttctcgcttaaaactgccgaagaaacgatgcaggcacaagcgagaaga

SEQ ID NO: 64445 - DNA, 50 bp, synthetic construct
  source 1..50: mol_type = other DNA
taatatcacttttttgagaagatttaaggcttgtggaaattcagatcagg

SEQ ID NO: 64446 - DNA, 50 bp, synthetic construct
  source 1..50: mol_type = other DNA
cgaataagtcaagctggctgctctgatcagaagcaagctggcgaaattcc

SEQ ID NO: 64447 - DNA, 50 bp, synthetic construct
  source 1..50: mol_type = other DNA
gcgcaaacaaaaaatgccccgccagcaggcggtgcagtagggcgcggcgg

SEQ ID NO: 64448 - DNA, 50 bp, synthetic construct
  source 1..50: mol_type = other DNA
attgagagaaccaaatatcctttgatctgttgggatacggttctaacaat

SEQ ID NO: 64449 - DNA, 50 bp, synthetic construct
  source 1..50: mol_type = other DNA
ccttgcatacacatcatattttgtgaaagaaaggtgaaaggtatccgaga

SEQ ID NO: 64450 - DNA, 50 bp, synthetic construct
  source 1..50: mol_type = other DNA
tatctcatcatcattttcttcttccggataaagaatatgatgaaggcaca

SEQ ID NO: 64451 - DNA, 50 bp, synthetic construct
  source 1..50: mol_type = other DNA
atcactctgaaagccaataatagcaatctatgaatcagacgcagatatct

SEQ ID NO: 64452 - DNA, 50 bp, synthetic construct
  source 1..50: mol_type = other DNA
ggctactttttttctcataattatagacaattaaacaaaaacgtggtaaa

SEQ ID NO: 64453 - DNA, 50 bp, synthetic construct
  source 1..50: mol_type = other DNA
gcactacaccgcggtagcttcataaattcctttatagtaacattcgaggt

SEQ ID NO: 64454 - DNA, 50 bp, synthetic construct
  source 1..50: mol_type = other DNA
agcgccagtcgcgcgagttggccgagcggctctgatacgccactggcgta

SEQ ID NO: 64455 - DNA, 50 bp, synthetic construct
  source 1..50: mol_type = other DNA
ttttatgataataaaaaataaatcttctattatttttttttatctccaaa

SEQ ID NO: 64456 - DNA, 50 bp, synthetic construct
  source 1..50: mol_type = other DNA
cattgacagcgatatagcggactccttagttaaagatattgttgggtatc

SEQ ID NO: 64457 - DNA, 50 bp, synthetic construct
  source 1..50: mol_type = other DNA
tacgctgccatcttcaatttctgcacaaagaaagataaaatggatgcgtt

SEQ ID NO: 64458 - DNA, 50 bp, synthetic construct
  source 1..50: mol_type = other DNA
gatagctgaagaaaaagcagctccgtaccgcttcttttccttcggcgatg

SEQ ID NO: 64459 - DNA, 50 bp, synthetic construct
  source 1..50: mol_type = other DNA
actgggcgatttttttatttacatttctgaatcaaggcaggatccgcagt

SEQ ID NO: 64460 - DNA, 50 bp, synthetic construct
  source 1..50: mol_type = other DNA
gcggtataaactttttcgcaaaagaagcattttggcaagtatttttccgc

SEQ ID NO: 64461 - DNA, 50 bp, synthetic construct
  source 1..50: mol_type = other DNA
atcaatactcttaattgtttttaatattcaaaacgcttaggagtatgatt

SEQ ID NO: 64462 - DNA, 50 bp, synthetic construct
  source 1..50: mol_type = other DNA
attttcctgaactagatgatgagcctgcgggtttacagcttcaggaaaat

SEQ ID NO: 64463 - DNA, 50 bp, synthetic construct
  source 1..50: mol_type = other DNA
gcgaaaaatggaaatcagaagcaaaactggaacggattcaaatttttcga

SEQ ID NO: 64464 - DNA, 50 bp, synthetic construct
  source 1..50: mol_type = other DNA
atgaaattcggattcaaaaaagccgtgactttttcccacacgcggtagtt

SEQ ID NO: 64465 - DNA, 50 bp, synthetic construct
  source 1..50: mol_type = other DNA
tgccattgatggagattttcaggtcgacggtaaaatcagcatcaaaacgg

SEQ ID NO: 64466 - DNA, 50 bp, synthetic construct
  source 1..50: mol_type = other DNA
tattaaagtattttctttttgcataatataaattagacatgactttaaca

SEQ ID NO: 64467 - DNA, 50 bp, synthetic construct
  source 1..50: mol_type = other DNA
attctcagtttctgtactgcttgcgcttaccaagttcaacagaatcgctt

SEQ ID NO: 64468 - DNA, 50 bp, synthetic construct
  source 1..50: mol_type = other DNA
ttgcaagctccgcttccacatcaaaattggtgtaataattgacctgattc

SEQ ID NO: 64469 - DNA, 50 bp, synthetic construct
  source 1..50: mol_type = other DNA
tttatactactaacttacaccgtccggtagctttaatttagtagtataaa

SEQ ID NO: 64470 - DNA, 50 bp, synthetic construct
  source 1..50: mol_type = other DNA
gatactgtgtaacagaataatcacagaggagaataagtatatgcatgata

SEQ ID NO: 64471 - DNA, 50 bp, synthetic construct
  source 1..50: mol_type = other DNA
actctaatctgcagcgtgagcacattaagactaacgatgagaaaaggagt

SEQ ID NO: 64472 - DNA, 50 bp, synthetic construct
  source 1..50: mol_type = other DNA
gaacttcttttctgtgatatttgtggataaaattctcgtcgacgaaagcg

SEQ ID NO: 64473 - DNA, 50 bp, synthetic construct
  source 1..50: mol_type = other DNA
tgtctatttcaattatccataattccattaatgtcacataatcacagatc

SEQ ID NO: 64474 - DNA, 50 bp, synthetic construct
  source 1..50: mol_type = other DNA
agtcttaagaaacgtacttttaccaaaaaggaagtgttatttttatgagt

SEQ ID NO: 64475 - DNA, 50 bp, synthetic construct
  source 1..50: mol_type = other DNA
gctataatgcgctataagtataaaaacgcataccggaaacggtttataaa

SEQ ID NO: 64476 - DNA, 50 bp, synthetic construct
  source 1..50: mol_type = other DNA
accgtatgttagtcggctcataaggaaatataagcctgttttcggcacat

SEQ ID NO: 64477 - DNA, 50 bp, synthetic construct
  source 1..50: mol_type = other DNA
cggcacggagatactggcataactgaatatgtggtggtgactccgcttgc

SEQ ID NO: 64478 - DNA, 50 bp, synthetic construct
  source 1..50: mol_type = other DNA
ggacgacagagataaggcaaagcggcggttttatgttacaagtagcggcg

SEQ ID NO: 64479 - DNA, 50 bp, synthetic construct
  source 1..50: mol_type = other DNA
caaataaatcaagaagaaaaggaaatttgaatttattcttgacttaatgc

SEQ ID NO: 64480 - DNA, 50 bp, synthetic construct
  source 1..50: mol_type = other DNA
ttcgggtcacattcatatgtcattataatgatatatggtatcatgtatac

SEQ ID NO: 64481 - DNA, 50 bp, synthetic construct
  source 1..50: mol_type = other DNA
aaaataagtacatcagaagctttggccaaaagccgttttgacgatatttt

SEQ ID NO: 64482 - DNA, 50 bp, synthetic construct
  source 1..50: mol_type = other DNA
caaggagtgccacaacgtggtgctgaaaatagcgtttggagcactccgca

SEQ ID NO: 64483 - DNA, 50 bp, synthetic construct
  source 1..50: mol_type = other DNA
tcaataccgcagtcttgaccgcaaatcggcggtttagagtgatatataga

SEQ ID NO: 64484 - DNA, 50 bp, synthetic construct
  source 1..50: mol_type = other DNA
cgatagcaggatgatgatcacgcatatgagcggtcagcagactgcccata

SEQ ID NO: 64485 - DNA, 50 bp, synthetic construct
  source 1..50: mol_type = other DNA
accccaatgaaagcacctcctattcttctctcaagtgctttctgcgaaat

SEQ ID NO: 64486 - DNA, 50 bp, synthetic construct
  source 1..50: mol_type = other DNA
gttttttgaattatactttcgaccaaaacataaattataacgcaaaaaaa

SEQ ID NO: 64487 - DNA, 50 bp, synthetic construct
  source 1..50: mol_type = other DNA
caaactgtggccgtctattcaaagtgcggtgaatttattgattgtagccg

SEQ ID NO: 64488 - DNA, 50 bp, synthetic construct
  source 1..50: mol_type = other DNA
gccgcagtgaacggctgaagaatggaagttctccagtatttcacaggtag

SEQ ID NO: 64489 - DNA, 50 bp, synthetic construct
  source 1..50: mol_type = other DNA
gctccacaataacctttgacaataccctttttcagaaaggattgtgatta

SEQ ID NO: 64490 - DNA, 50 bp, synthetic construct
  source 1..50: mol_type = other DNA
taaaagggcataaatcaccgttttataaagaggtaatttaaaatgatgaa

SEQ ID NO: 64491 - DNA, 50 bp, synthetic construct
  source 1..50: mol_type = other DNA
ctatcgttgaagattattttagttggaggtgaaataaaaatgtacgaaaa

SEQ ID NO: 64492 - DNA, 50 bp, synthetic construct
  source 1..50: mol_type = other DNA
gcttttttcagaaaatccaagcttacagaaaaagaaattctgataaacat

SEQ ID NO: 64493 - DNA, 50 bp, synthetic construct
  source 1..50: mol_type = other DNA
aaaaataagcgtgtattgtataaatatttataccatactgcaagtgttga

SEQ ID NO: 64494 - DNA, 50 bp, synthetic construct
  source 1..50: mol_type = other DNA
atattagtacattttttaagtgggtatccactttaaataataaaaaaata

SEQ ID NO: 64495 - DNA, 50 bp, synthetic construct
  source 1..50: mol_type = other DNA
gttctgtaagatttataagcaataaattttgcatgactcagtaacaaaac

SEQ ID NO: 64496 - DNA, 50 bp, synthetic construct
  source 1..50: mol_type = other DNA
gttctgggggactattatcgcaatagattgcgataatagcctgccatgct

SEQ ID NO: 64497 - DNA, 50 bp, synthetic construct
  source 1..50: mol_type = other DNA
acggaaataaaggttggagaatagaacaatatgccaagcaggtattccgt

SEQ ID NO: 64498 - DNA, 50 bp, synthetic construct
  source 1..50: mol_type = other DNA
ttatatgctaaatgggctgataagtatcgttcaattgacttgctatataa

SEQ ID NO: 64499 - DNA, 50 bp, synthetic construct
  source 1..50: mol_type = other DNA
attaaaattaaattgtaaaaagctgcttctttacctagtttattatctaa

SEQ ID NO: 64500 - DNA, 50 bp, synthetic construct
  source 1..50: mol_type = other DNA
gaatgcaattttccgaacttaacgacagttccgttttgtaaattttctat

SEQ ID NO: 64501 - DNA, 50 bp, synthetic construct
  source 1..50: mol_type = other DNA
tggttcaaagggtttattatgaaactaatcaaaataaacctcctgcaaac

SEQ ID NO: 64502 - DNA, 50 bp, synthetic construct
  source 1..50: mol_type = other DNA
ctctaaaagaggaatttatcaagtcaacttgcgaaagaatcattttatta

SEQ ID NO: 64503 - DNA, 50 bp, synthetic construct
  source 1..50: mol_type = other DNA
ttctaacgtttgccatttttagagctctttaaaactgtaaaaggaagaat

SEQ ID NO: 64504 - DNA, 50 bp, synthetic construct
  source 1..50: mol_type = other DNA
ataaattttagatttactattgaaaaataaatacttttattaaaatttat

SEQ ID NO: 64505 - DNA, 50 bp, synthetic construct
  source 1..50: mol_type = other DNA
tagctgctaacccgcctacacctataaagaattagattagtggggtgact

SEQ ID NO: 64506 - DNA, 50 bp, synthetic construct
  source 1..50: mol_type = other DNA
cgtgctccgcttctggggctggcggggaacagtcgcaggggcggcactgg

SEQ ID NO: 64507 - DNA, 50 bp, synthetic construct
  source 1..50: mol_type = other DNA
cggtatgtgacatgttaccgtcaaatttctaagtaattgtgccagtttac

SEQ ID NO: 64508 - DNA, 50 bp, synthetic construct
  source 1..50: mol_type = other DNA
ccattgcgtcaaagtgtggattgcttccaatccaaactgtctacacatga

SEQ ID NO: 64509 - DNA, 50 bp, synthetic construct
  source 1..50: mol_type = other DNA
gcagaacacaagcgtcaattctggcgttctacttaggctgttatttttgt

SEQ ID NO: 64510 - DNA, 50 bp, synthetic construct
  source 1..50: mol_type = other DNA
gcaaccgacaactaccttgactctaacgtgacgcatcagctgtcggtcct

SEQ ID NO: 64511 - DNA, 50 bp, synthetic construct
  source 1..50: mol_type = other DNA
gaaagcggtcattgacgagcccgccggcgaagcaatcccggaggatgtta

SEQ ID NO: 64512 - DNA, 50 bp, synthetic construct
  source 1..50: mol_type = other DNA
tatgaaaggttgaatcttgatacaaatataccgagtcgccggattttgag

SEQ ID NO: 64513 - DNA, 50 bp, synthetic construct
  source 1..50: mol_type = other DNA
cttttttatttggacgggattgctatgtcaacacataaagaataaaaaac

SEQ ID NO: 64514 - DNA, 50 bp, synthetic construct
  source 1..50: mol_type = other DNA
cttttctttcatttcaggcgtccagctggacgcttgcaagggtataaacg

SEQ ID NO: 64515 - DNA, 50 bp, synthetic construct
  source 1..50: mol_type = other DNA
gaactctccaaaattctggtactgtgaccgaccgtgctgctgttctgttc

SEQ ID NO: 64516 - DNA, 50 bp, synthetic construct
  source 1..50: mol_type = other DNA
cttttccttccttcacaggatgagatgtcactacccgaagataggaaaag

SEQ ID NO: 64517 - DNA, 50 bp, synthetic construct
  source 1..50: mol_type = other DNA
gatttttctcccatggttcctcctaattaagaaatgtaaataaaaaaatc

SEQ ID NO: 64518 - DNA, 50 bp, synthetic construct
  source 1..50: mol_type = other DNA
ggttcttaacctatgacaacatggcggaaccacttgcaacagcaatgata

SEQ ID NO: 64519 - DNA, 50 bp, synthetic construct
  source 1..50: mol_type = other DNA
taaatcccttgtcccgcattgtaaaatttcaacccattcgatataaaaac

SEQ ID NO: 64520 - DNA, 50 bp, synthetic construct
  source 1..50: mol_type = other DNA
gcaacatatgtgtatcctttgccataggcagcaactttctttttctttgt

SEQ ID NO: 64521 - DNA, 50 bp, synthetic construct
  source 1..50: mol_type = other DNA
attccttgaatatattctttttcctttacaataaaatcaattcaaagaaa

SEQ ID NO: 64522 - DNA, 50 bp, synthetic construct
  source 1..50: mol_type = other DNA
atattggccctcgggttaataggtaaaataaacggtccgagcttcacatc

SEQ ID NO: 64523 - DNA, 50 bp, synthetic construct
  source 1..50: mol_type = other DNA
tccggagtatggatgaagtacctccggaggggttcagttagtagtataac

SEQ ID NO: 64524 - DNA, 50 bp, synthetic construct
  source 1..50: mol_type = other DNA
catcgtgcgggttttcaagagatgatcaaaaaatatgaccctgtcatcgg

SEQ ID NO: 64525 - DNA, 50 bp, synthetic construct
  source 1..50: mol_type = other DNA
gttaccacttttaaatctccgttgttagctggacttataaaaatgtttcc

SEQ ID NO: 64526 - DNA, 50 bp, synthetic construct
  source 1..50: mol_type = other DNA
tgtaacggattggaacccatttgaaaggaaatcatttacaatactgactg

SEQ ID NO: 64527 - DNA, 50 bp, synthetic construct
  source 1..50: mol_type = other DNA
atgcacacagctaaatgattgtaacaataagcgcaaaaaatcaccttggg

SEQ ID NO: 64528 - DNA, 50 bp, synthetic construct
  source 1..50: mol_type = other DNA
tgacgcttatctgataaaataccttataatattatatcataaatctgtaa

SEQ ID NO: 64529 - DNA, 50 bp, synthetic construct
  source 1..50: mol_type = other DNA
atcatggaggaggagcagggaagaactcccctcggctccaccatttagaa

SEQ ID NO: 64530 - DNA, 50 bp, synthetic construct
  source 1..50: mol_type = other DNA
caagacgttattaaaatatgtgatacttgataaatgacgataatagagtg

SEQ ID NO: 64531 - DNA, 50 bp, synthetic construct
  source 1..50: mol_type = other DNA
tcatgtttccatttatatttcaagactaggaaaaatagctggactcctga

SEQ ID NO: 64532 - DNA, 50 bp, synthetic construct
  source 1..50: mol_type = other DNA
tttttcaaattttcacctccaagcaatggaggatattaaaaaatgaaaaa

SEQ ID NO: 64533 - DNA, 50 bp, synthetic construct
  source 1..50: mol_type = other DNA
ttctggaagccctctccttgtggatgcaggcaaggggaaaatcatgagaa

SEQ ID NO: 64534 - DNA, 50 bp, synthetic construct
  source 1..50: mol_type = other DNA
tgcaaaggtgtttgattctgcgtcatgatcccgctggactttgctttgcc

SEQ ID NO: 64535 - DNA, 50 bp, synthetic construct
  source 1..50: mol_type = other DNA
atgaggctgtacaggtattctgcttgtccggtctgcaagtatcccctgag

SEQ ID NO: 64536 - DNA, 50 bp, synthetic construct
  source 1..50: mol_type = other DNA
ggcattatttccgcgaacaatggagattttatgttcatcgacatgccgcc

SEQ ID NO: 64537 - DNA, 50 bp, synthetic construct
  source 1..50: mol_type = other DNA
atatagtgtattaatttatttttatatgtaaagtagacaaatgcttatga

SEQ ID NO: 64538 - DNA, 50 bp, synthetic construct
  source 1..50: mol_type = other DNA
ccatagtatatcactcctttatatttaaaaaagtacttgcattgttatgg

SEQ ID NO: 64539 - DNA, 50 bp, synthetic construct
  source 1..50: mol_type = other DNA
gttgtcacctcgatagtgccttctgcatcaggaagcctgccagtgcgccg

SEQ ID NO: 64540 - DNA, 50 bp, synthetic construct
  source 1..50: mol_type = other DNA
aaagttgtaattcggggggtctacatgatagattgaacaccgtagtcttt

SEQ ID NO: 64541 - DNA, 50 bp, synthetic construct
  source 1..50: mol_type = other DNA
atgacctccaaacaaaaagacccgcgtggatgttttcaaggcactggcac

SEQ ID NO: 64542 - DNA, 50 bp, synthetic construct
  source 1..50: mol_type = other DNA
gagaaatcaaatatgctgcagaaagaattcaagggcaagatctatttcgc

SEQ ID NO: 64543 - DNA, 50 bp, synthetic construct
  source 1..50: mol_type = other DNA
ccggaatataaaacgatatctcccgcatatcttcgtgtagtatattccgc

SEQ ID NO: 64544 - DNA, 50 bp, synthetic construct
  source 1..50: mol_type = other DNA
atctcccgcctgcgtcgttgtctggaaagaccgctccagagcagaaagct

SEQ ID NO: 64545 - DNA, 50 bp, synthetic construct
  source 1..50: mol_type = other DNA
gacatctgatcgagcttgtcgctcaccggtcacaaggtcgatcacccatg

SEQ ID NO: 64546 - DNA, 50 bp, synthetic construct
  source 1..50: mol_type = other DNA
ttgcacttattctttatagggaagatctaacaatgaaagagcaagtcgcc

SEQ ID NO: 64547 - DNA, 50 bp, synthetic construct
  source 1..50: mol_type = other DNA
atgcagggtgtttttttgatgtgtcaacacacaagggctacctgcggcat

SEQ ID NO: 64548 - DNA, 50 bp, synthetic construct
  source 1..50: mol_type = other DNA
gggtttggagtaaaaaaagacatatatatgagtgagaatattttgagaat

SEQ ID NO: 64549 - DNA, 50 bp, synthetic construct
  source 1..50: mol_type = other DNA
ttcccacatctggagctaaaacgctctcggctgatgatggcctggtggtg

SEQ ID NO: 64550 - DNA, 50 bp, synthetic construct
  source 1..50: mol_type = other DNA
gtcgatggccttgatcagaccgatacctcggtctgggtctttccttcgaa

SEQ ID NO: 64551 - DNA, 50 bp, synthetic construct
  source 1..50: mol_type = other DNA
tactcatcctgctacctcctgttatgtaacagtgctcagcaacactttca

SEQ ID NO: 64552 - DNA, 50 bp, synthetic construct
  source 1..50: mol_type = other DNA
tgagcaaacgaaattttgcaaacatatctttcaatcggcatttttgcgca

SEQ ID NO: 64553 - DNA, 50 bp, synthetic construct
  source 1..50: mol_type = other DNA
actgaccgatgagaacaattgaaaattttcagaaaatctcacaaaggcat

SEQ ID NO: 64554 - DNA, 50 bp, synthetic construct
  source 1..50: mol_type = other DNA
atacttattttaactgcaagaggctagtcttttaagtcgaaaatcagagc

SEQ ID NO: 64555 - DNA, 50 bp, synthetic construct
  source 1..50: mol_type = other DNA
cagcatacacgagaaaaatatcctggagtatattttttatccttatgctt

SEQ ID NO: 64556 - DNA, 50 bp, synthetic construct
  source 1..50: mol_type = other DNA
aaatcactcctttccgacactatatatacgatagacaaaatcgggagcga

SEQ ID NO: 64557 - DNA, 50 bp, synthetic construct
  source 1..50: mol_type = other DNA
tgccagtgatatgattttttcgtttggccgaattgatgccggaaattgct

SEQ ID NO: 64558 - DNA, 50 bp, synthetic construct
  source 1..50: mol_type = other DNA
ctgcatgaaaaatgaaaaaatgtactcagcttttttaattttcagttcag

SEQ ID NO: 64559 - DNA, 50 bp, synthetic construct
  source 1..50: mol_type = other DNA
ttcgcctatttcaagaagaagggcatcgactatgatagtagaaggacagg

SEQ ID NO: 64560 - DNA, 50 bp, synthetic construct
  source 1..50: mol_type = other DNA
ggcctcttgaaccccattcaagcgcgcaggcgtggtcagcagaaactcga

SEQ ID NO: 64561 - DNA, 50 bp, synthetic construct
  source 1..50: mol_type = other DNA
accaaaggtctttgggcaaatcaaacttgttgtgcaaccggagctttttg

SEQ ID NO: 64562 - DNA, 50 bp, synthetic construct
  source 1..50: mol_type = other DNA
atgacagcaaaaagctactcttatcagcaagtccctctttctcaactaaa

SEQ ID NO: 64563 - DNA, 50 bp, synthetic construct
  source 1..50: mol_type = other DNA
gtatccttatcatccttgtcaatgatggaagacatggattctgaaacgga

SEQ ID NO: 64564 - DNA, 50 bp, synthetic construct
  source 1..50: mol_type = other DNA
cttcccttactattacctgcattttaaagcgcagggactctcacaggaag

SEQ ID NO: 64565 - DNA, 50 bp, synthetic construct
  source 1..50: mol_type = other DNA
tataacttatttttttcggatatattgatagggataaaaaacgaagcggg

SEQ ID NO: 64566 - DNA, 50 bp, synthetic construct
  source 1..50: mol_type = other DNA
ctcctttctcacgataggggcagtccactgcccctgcaagcagcatcaga

SEQ ID NO: 64567 - DNA, 50 bp, synthetic construct
  source 1..50: mol_type = other DNA
cccttgatgagccgcataaagaaaaatttcttgattttgctattcaagac

SEQ ID NO: 64568 - DNA, 50 bp, synthetic construct
  source 1..50: mol_type = other DNA
actttttcacccccattatgctgttgacagcgcccaagggcgggcattaa

SEQ ID NO: 64569 - DNA, 50 bp, synthetic construct
  source 1..50: mol_type = other DNA
ttcgtctgtcataccaaatcttcctttgaacggtgagaatgaagtacgct

SEQ ID NO: 64570 - DNA, 50 bp, synthetic construct
  source 1..50: mol_type = other DNA
tagagcgcggaagcacgtttatcgcgcgacgtcgtttcgtccgtcgattc

SEQ ID NO: 64571 - DNA, 50 bp, synthetic construct
  source 1..50: mol_type = other DNA
tgggaagaatatctgcagaaagctgaccgaccgtgctgctgttctgctca

SEQ ID NO: 64572 - DNA, 50 bp, synthetic construct
  source 1..50: mol_type = other DNA
tatggtgtgaacattggggatgccatgctgatactaaacaagtaaccaaa

SEQ ID NO: 64573 - DNA, 50 bp, synthetic construct
  source 1..50: mol_type = other DNA
ttaaatttttccattttattgtcggctcgcaagagaatgtacaaatcata

SEQ ID NO: 64574 - DNA, 50 bp, synthetic construct
  source 1..50: mol_type = other DNA
tttgcgttgtagccatttgtagccatggctgttgataaaaaaggcacaaa

SEQ ID NO: 64575 - DNA, 50 bp, synthetic construct
  source 1..50: mol_type = other DNA
tatgtttgcatagagtgggctaaaattttattatcgataatactcggctc

SEQ ID NO: 64576 - DNA, 50 bp, synthetic construct
  source 1..50: mol_type = other DNA
cgcgccgattatattctctccggcaaaccgcccggaaaggaagtgttatc

SEQ ID NO: 64577 - DNA, 50 bp, synthetic construct
  source 1..50: mol_type = other DNA
acactacatgcaatcggaaaaggaattcgtactcctgtggtattgtgtgt

SEQ ID NO: 64578 - DNA, 50 bp, synthetic construct
  source 1..50: mol_type = other DNA
ttttcgtaagggaacaaatactaccccctcacttttttcctttggacaag

SEQ ID NO: 64579 - DNA, 50 bp, synthetic construct
  source 1..50: mol_type = other DNA
atactaattacataatttatcattataatgtctgatattgctgttatata

SEQ ID NO: 64580 - DNA, 50 bp, synthetic construct
  source 1..50: mol_type = other DNA
ttgatttttatttttattaaaaaaattttttgcgtctatataaatcactc

SEQ ID NO: 64581 - DNA, 50 bp, synthetic construct
  source 1..50: mol_type = other DNA
atatatatcaagtcatatttggcataaaaacaatacgcattgcaatccat

SEQ ID NO: 64582 - DNA, 50 bp, synthetic construct
  source 1..50: mol_type = other DNA
actatcacagcaagagttttcgccatattccggccttttagagtgatata

SEQ ID NO: 64583 - DNA, 50 bp, synthetic construct
  source 1..50: mol_type = other DNA
ctttccaataaggattctgcctcagaaatggccaaatccgtaaccacaat

SEQ ID NO: 64584 - DNA, 50 bp, synthetic construct
  source 1..50: mol_type = other DNA
aaattagggtatcggattccatatatctatataccggccaacccgcaaaa

SEQ ID NO: 64585 - DNA, 50 bp, synthetic construct
  source 1..50: mol_type = other DNA
aataaaattagaaagctctatgaaaattcatcacaaatagaagaatacat

SEQ ID NO: 64586 - DNA, 50 bp, synthetic construct
  source 1..50: mol_type = other DNA
gaacctattaaaagagcctatcccttgttgaagcaaagcttgctgaaggt

SEQ ID NO: 64587 - DNA, 50 bp, synthetic construct
  source 1..50: mol_type = other DNA
aagtccgaggattttccgtggtaaccttggcaccttccgtccggtgaagg

SEQ ID NO: 64588 - DNA, 50 bp, synthetic construct
  source 1..50: mol_type = other DNA
tagatttacaaattgccgatacggtatgtttatcgtcgtttgtaatacta

SEQ ID NO: 64589 - DNA, 50 bp, synthetic construct
  source 1..50: mol_type = other DNA
ctaataatccttattatcgtccatattatgatgtcaataaaattaaagaa

SEQ ID NO: 64590 - DNA, 50 bp, synthetic construct
  source 1..50: mol_type = other DNA
tttcgataccgacatcggaaccgaggctctgaccgacatcggtatatccg

SEQ ID NO: 64591 - DNA, 50 bp, synthetic construct
  source 1..50: mol_type = other DNA
ctttgtcccattatttactttttcctgattttactgaacttttgatggct

SEQ ID NO: 64592 - DNA, 50 bp, synthetic construct
  source 1..50: mol_type = other DNA
cgtaacgccgcgagatcaccgcaatttaaaagtgacctggagtttttcta

SEQ ID NO: 64593 - DNA, 50 bp, synthetic construct
  source 1..50: mol_type = other DNA
aaccacggaatcacccatcggcgcaagagccgatggattttactccaccg

SEQ ID NO: 64594 - DNA, 50 bp, synthetic construct
  source 1..50: mol_type = other DNA
ctgtgtaggatttcatttagattaaaaaatcataggaaaatcagggattt

SEQ ID NO: 64595 - DNA, 50 bp, synthetic construct
  source 1..50: mol_type = other DNA
aaaaaatcaaataatttcatagcgcatacctgaaaaataactgaataatg

SEQ ID NO: 64596 - DNA, 50 bp, synthetic construct
  source 1..50: mol_type = other DNA
gaacgtgccgaggccgacgtgcagtgacgcacgcatcggcgtgcgcatgg

SEQ ID NO: 64597 - DNA, 50 bp, synthetic construct
  source 1..50: mol_type = other DNA
gctataaccccatgtcagttgaatgtattgtactgacgaatctgcatagc

SEQ ID NO: 64598 - DNA, 50 bp, synthetic construct
  source 1..50: mol_type = other DNA
atttttaccacctctatatatagtatactatttgagtcgctgatgagagg

SEQ ID NO: 64599 - DNA, 50 bp, synthetic construct
  source 1..50: mol_type = other DNA
ggagatataaaatgcttttttatcatgataacatagctcgctttatctgt

SEQ ID NO: 64600 - DNA, 50 bp, synthetic construct
  source 1..50: mol_type = other DNA
tccgcatcagaagttacgaatattgcaacattccagacaagagtatttat

SEQ ID NO: 64601 - DNA, 50 bp, synthetic construct
  source 1..50: mol_type = other DNA
ccaaacaaaaaggcccgcgccggagcgctggcgagagctttttcccggac

SEQ ID NO: 64602 - DNA, 50 bp, synthetic construct
  source 1..50: mol_type = other DNA
taatatatataaagtcaatattattaaggagatgatacctatgaattttt

SEQ ID NO: 64603 - DNA, 50 bp, synthetic construct
  source 1..50: mol_type = other DNA
ttgaaaaagagcttgccgttttccgacaaattcggtaatttctttgaggt

SEQ ID NO: 64604 - DNA, 50 bp, synthetic construct
  source 1..50: mol_type = other DNA
gaatgagctgaggagagcgactctcggcggttcgttttctcatttcacgt

SEQ ID NO: 64605 - DNA, 50 bp, synthetic construct
  source 1..50: mol_type = other DNA
ccattggaggcgggggtaaagataccgatgcgcacccccgggccgaatgg

SEQ ID NO: 64606 - DNA, 50 bp, synthetic construct
  source 1..50: mol_type = other DNA
gaaaagtaacacaaatacctgcaaccatcatcatggaaatgttctatggt

SEQ ID NO: 64607 - DNA, 50 bp, synthetic construct
  source 1..50: mol_type = other DNA
tttgagtgcttttttatttgcataagtatagatatcgaaaccttttccga

SEQ ID NO: 64608 - DNA, 50 bp, synthetic construct
  source 1..50: mol_type = other DNA
tctttccactcttggagctgttctttttgactgttgaaagtgtggaaaga

SEQ ID NO: 64609 - DNA, 50 bp, synthetic construct
  source 1..50: mol_type = other DNA
aaaaatgttaattgggttcattcttcctaatttccccaattatcattggc

SEQ ID NO: 64610 - DNA, 50 bp, synthetic construct
  source 1..50: mol_type = other DNA
caattatgaacgccgttattattgcgagaaaagaacggcgtagaaaaggg

SEQ ID NO: 64611 - DNA, 50 bp, synthetic construct
  source 1..50: mol_type = other DNA
ttgttttgtatgtttatctttacgttctcaattaaaaatatataaaaatg

SEQ ID NO: 64612 - DNA, 50 bp, synthetic construct
  source 1..50: mol_type = other DNA
agccccttctaaaatcgggggattctcccacaacggtttgggggcgggct

SEQ ID NO: 64613 - DNA, 50 bp, synthetic construct
  source 1..50: mol_type = other DNA
tcggaattgtttggcaaactgaaatattatctctctctgaattcttcaaa

SEQ ID NO: 64614 - DNA, 50 bp, synthetic construct
  source 1..50: mol_type = other DNA
attatatcagctcttggtagtgcttgagcacgtacaatcatataaatcct

SEQ ID NO: 64615 - DNA, 50 bp, synthetic construct
  source 1..50: mol_type = other DNA
ttagtaggtaaatttattagtgatataacagccttttatttggctgctat

SEQ ID NO: 64616 - DNA, 50 bp, synthetic construct
  source 1..50: mol_type = other DNA
taatgctaggcaagcaagaatactcaacttttcttttttgtaaaccatta

SEQ ID NO: 64617 - DNA, 50 bp, synthetic construct
  source 1..50: mol_type = other DNA
tctttcttgaaatatgaactcattctaatgttttcaaatgtatttgaaca

SEQ ID NO: 64618 - DNA, 50 bp, synthetic construct
  source 1..50: mol_type = other DNA
tcataaggtcataaaatggaaaattatttttgcattaagaatccttataa

SEQ ID NO: 64619 - DNA, 50 bp, synthetic construct
  source 1..50: mol_type = other DNA
aagaataattcttcattttaataatattcaaaaagtgaatcggaaatcgt

SEQ ID NO: 64620 - DNA, 50 bp, synthetic construct
  source 1..50: mol_type = other DNA
aataaaaaatacggctgttttgtaatatataaacagccgtcaatttggcg

SEQ ID NO: 64621 - DNA, 50 bp, synthetic construct
  source 1..50: mol_type = other DNA
ttgatttgtactctcatatgacaggaagggtgtatgtcccatcaaatcat

SEQ ID NO: 64622 - DNA, 50 bp, synthetic construct
  source 1..50: mol_type = other DNA
ttcaaacttttgttttcctaacctctattttaggcaaaaaaataacagcc

SEQ ID NO: 64623 - DNA, 50 bp, synthetic construct
  source 1..50: mol_type = other DNA
cttaacatctgcgccatctactgaatttagtaattggattaattgttgat

SEQ ID NO: 64624 - DNA, 50 bp, synthetic construct
  source 1..50: mol_type = other DNA
attattatctagtatttctttttttaaaatgagaacagctttatacttaa

SEQ ID NO: 64625 - DNA, 50 bp, synthetic construct
  source 1..50: mol_type = other DNA
tacaattaattcttttaaatgatttaaatcatctatatatatttttaaat

SEQ ID NO: 64626 - DNA, 50 bp, synthetic construct
  source 1..50: mol_type = other DNA
atgttctgaatcagataacgattccgttatcaggggatggggagaaatca

SEQ ID NO: 64627 - DNA, 50 bp, synthetic construct
  source 1..50: mol_type = other DNA
tatataacagcaatatcagacattattattccggaagttcttagaaaata

SEQ ID NO: 64628 - DNA, 50 bp, synthetic construct
  source 1..50: mol_type = other DNA
gcgggctttttcttttttgccatgaaacaaagaaaaaagaaccagccgaa

SEQ ID NO: 64629 - DNA, 50 bp, synthetic construct
  source 1..50: mol_type = other DNA
ccataataaaaaattaccacaaaaatttttgttataaatcttttatctgc

SEQ ID NO: 64630 - DNA, 50 bp, synthetic construct
  source 1..50: mol_type = other DNA
tttggctatcggattgaaaatggcactgcagcctcaagagaatatccaat

SEQ ID NO: 64631 - DNA, 50 bp, synthetic construct
  source 1..50: mol_type = other DNA
tcgattcgctttttatttccatgtcctcatagaaagcgagagtaaataat

SEQ ID NO: 64632 - DNA, 50 bp, synthetic construct
  source 1..50: mol_type = other DNA
ccggtctgacaatctggtattcgatgggatggtccgctttccctgaccga

SEQ ID NO: 64633 - DNA, 50 bp, synthetic construct
  source 1..50: mol_type = other DNA
tcaaatgacatgacaccgtatctggtataatgaggtggcgggacttttga

SEQ ID NO: 64634 - DNA, 50 bp, synthetic construct
  source 1..50: mol_type = other DNA
aaatggtaaagacaatgcacttgcaaggataacgtttgtattgccgattt

SEQ ID NO: 64635 - DNA, 50 bp, synthetic construct
  source 1..50: mol_type = other DNA
ccggactatccccaaatatagttttaaaaaatacatgtgaggtgatccta

SEQ ID NO: 64636 - DNA, 50 bp, synthetic construct
  source 1..50: mol_type = other DNA
ccccttttagaaaatccttttttgttcgcaaaagtatttgagcgaagtca

SEQ ID NO: 64637 - DNA, 50 bp, synthetic construct
  source 1..50: mol_type = other DNA
aatgaaaaatactgctaattctatccatcgacttgcggagctttttcact

SEQ ID NO: 64638 - DNA, 50 bp, synthetic construct
  source 1..50: mol_type = other DNA
aagtcttacagaataggcagaactgatgcaatgcttatcctgtaaaggat

SEQ ID NO: 64639 - DNA, 50 bp, synthetic construct
  source 1..50: mol_type = other DNA
aaaaagagagtgcggtgtcgaatgtgagctgtccacccattttggctttt

SEQ ID NO: 64640 - DNA, 50 bp, synthetic construct
  source 1..50: mol_type = other DNA
tcttcatccagctccgttgcatagcactatgtcatgggtctggatgaaat

SEQ ID NO: 64641 - DNA, 50 bp, synthetic construct
  source 1..50: mol_type = other DNA
aatatttagatgataaattttaacatttcctttggtaccaagtatccttt

SEQ ID NO: 64642 - DNA, 50 bp, synthetic construct
  source 1..50: mol_type = other DNA
gaaagataacggacaagagaaaaattttaatctcctttgtgatatttttc

SEQ ID NO: 64643 - DNA, 50 bp, synthetic construct
  source 1..50: mol_type = other DNA
tttttgaagcccgcggctattccgcccagaagcttcgggtggccgcttac

SEQ ID NO: 64644 - DNA, 50 bp, synthetic construct
  source 1..50: mol_type = other DNA
tggtgttctccgtgtgcagagcgggagagcataaacgtgggagagaacaa

SEQ ID NO: 64645 - DNA, 50 bp, synthetic construct
  source 1..50: mol_type = other DNA
tttttgcaaaatgggtatgcagtggcaagatatacaaaattttgctctga

SEQ ID NO: 64646 - DNA, 50 bp, synthetic construct
  source 1..50: mol_type = other DNA
atgtacatataattcattaaaatttctatgttaagagattatatactagg

SEQ ID NO: 64647 - DNA, 50 bp, synthetic construct
  source 1..50: mol_type = other DNA
ctgaagctcacggatggcaggtttaggagtggcagagcttggagattcag

SEQ ID NO: 64648 - DNA, 50 bp, synthetic construct
  source 1..50: mol_type = other DNA
gtatccccgtgttcaggaatgtcggaatttttgaaagaagaaggagatac

SEQ ID NO: 64649 - DNA, 50 bp, synthetic construct
  source 1..50: mol_type = other DNA
cgtgataggcttttttattatttgcggggtccccaaaaaagcgtgagctt

SEQ ID NO: 64650 - DNA, 50 bp, synthetic construct
  source 1..50: mol_type = other DNA
accacaaaaagacgggaccgaaatccgctttggaatattttttttgctga

SEQ ID NO: 64651 - DNA, 50 bp, synthetic construct
  source 1..50: mol_type = other DNA
aaacggtggaattcttttcacatatcttcgtgtagtatattccgctgaaa

SEQ ID NO: 64652 - DNA, 50 bp, synthetic construct
  source 1..50: mol_type = other DNA
ttggacaaactaatggaagcggttatcgcttctttgatcgcagcttccag

SEQ ID NO: 64653 - DNA, 50 bp, synthetic construct
  source 1..50: mol_type = other DNA
tatcatcctttctctgaatataaatatttatgatgtatttaaacggatgc

SEQ ID NO: 64654 - DNA, 50 bp, synthetic construct
  source 1..50: mol_type = other DNA
ggcagcgctgtaagcttgaccaccgcggtggcggaactggcagacgcaag

SEQ ID NO: 64655 - DNA, 50 bp, synthetic construct
  source 1..50: mol_type = other DNA
tttgtttagtaatcttttaaaagataacttttaatgctacacgtttgaaa

SEQ ID NO: 64656 - DNA, 50 bp, synthetic construct
  source 1..50: mol_type = other DNA
tacttttaaaactgcatatttttttggatgaaaatgcagcattaaaaaag

SEQ ID NO: 64657 - DNA, 50 bp, synthetic construct
  source 1..50: mol_type = other DNA
aaaaaacataccttccagactttctaaaaagggcgggacaaattttttat

SEQ ID NO: 64658 - DNA, 50 bp, synthetic construct
  source 1..50: mol_type = other DNA
acatttcagaaaaaggttacggtatcggaggtgtgatttttcgcaaatgg

SEQ ID NO: 64659 - DNA, 50 bp, synthetic construct
  source 1..50: mol_type = other DNA
acatattgtatcgcctccatgtattgatacatgaagatggtaaggatatg

SEQ ID NO: 64660 - DNA, 50 bp, synthetic construct
  source 1..50: mol_type = other DNA
taaatgctggtctgcttttctgctgcaggggaaatgcagcgccgctatta

SEQ ID NO: 64661 - DNA, 50 bp, synthetic construct
  source 1..50: mol_type = other DNA
atctgtgcctcctttaattgtttctttcaacgattattccgtttttaaca

SEQ ID NO: 64662 - DNA, 50 bp, synthetic construct
  source 1..50: mol_type = other DNA
cataaattaacatcggcaatggacagtgtcaattgctgtttccattcatc

SEQ ID NO: 64663 - DNA, 50 bp, synthetic construct
  source 1..50: mol_type = other DNA
agtcatggattcttacacctcttttgaaagctatgtgtgacaccatgcag

SEQ ID NO: 64664 - DNA, 50 bp, synthetic construct
  source 1..50: mol_type = other DNA
ttacaaacccgtctgctgtgcataattatctgcagcagcctctatctgaa

SEQ ID NO: 64665 - DNA, 50 bp, synthetic construct
  source 1..50: mol_type = other DNA
acgctcttgggaatcataattgtattgcagattatgagttataatattta

SEQ ID NO: 64666 - DNA, 50 bp, synthetic construct
  source 1..50: mol_type = other DNA
gaaggtcgttgaggaagctaggaaattgaccaacttttttctgcatgaaa

SEQ ID NO: 64667 - DNA, 50 bp, synthetic construct
  source 1..50: mol_type = other DNA
tattattatagcactaacaatatgaaaatattgttagtgctaaactaagg

SEQ ID NO: 64668 - DNA, 50 bp, synthetic construct
  source 1..50: mol_type = other DNA
taaaagggaacgatacaaaggaaaattttatcatgtatcagtcaaacaac

SEQ ID NO: 64669 - DNA, 50 bp, synthetic construct
  source 1..50: mol_type = other DNA
gtagtacctccttatattttgttttaaaaatattaacttaaagaggtgtt

SEQ ID NO: 64670 - DNA, 50 bp, synthetic construct
  source 1..50: mol_type = other DNA
taagtgcgccttttatactacccgtactggtggtaatacttccgtccctg

SEQ ID NO: 64671 - DNA, 50 bp, synthetic construct
  source 1..50: mol_type = other DNA
tccgcataaaatcagctcctttcgacgagaaggagttgattgcatgggcc

SEQ ID NO: 64672 - DNA, 50 bp, synthetic construct
  source 1..50: mol_type = other DNA
cctttctctcattggattttagacattccttgtaaagaaatagagacagc

SEQ ID NO: 64673 - DNA, 50 bp, synthetic construct
  source 1..50: mol_type = other DNA
gtcgggtatagcgcagtcggcggcgagcgtgagaaatgaatattcaagag

SEQ ID NO: 64674 - DNA, 50 bp, synthetic construct
  source 1..50: mol_type = other DNA
agaacacggttacgataaagtacagaaatgtcaatggaaaactgtgcaaa

SEQ ID NO: 64675 - DNA, 50 bp, synthetic construct
  source 1..50: mol_type = other DNA
taaaaaacatcaatgtattcacggggcagtaaatttattgatggttgcag

SEQ ID NO: 64676 - DNA, 50 bp, synthetic construct
  source 1..50: mol_type = other DNA
gcactataaaggaaaagaaaaaaggattttttgttgcctaaaaataggca

SEQ ID NO: 64677 - DNA, 50 bp, synthetic construct
  source 1..50: mol_type = other DNA
aaaatataaattttaaaataaaatctttttagttttaattttaatatttt

SEQ ID NO: 64678 - DNA, 50 bp, synthetic construct
  source 1..50: mol_type = other DNA
caaagggcgcggccgcgcgcaaaagcggatgacaatggcatctaccgttt

SEQ ID NO: 64679 - DNA, 50 bp, synthetic construct
  source 1..50: mol_type = other DNA
atttaattaacgaatataagttttataaggataacggaaaagaaggaaag

SEQ ID NO: 64680 - DNA, 50 bp, synthetic construct
  source 1..50: mol_type = other DNA
taaatgaattttttaacctcttatcccttagcaacggttattttcattta

SEQ ID NO: 64681 - DNA, 50 bp, synthetic construct
  source 1..50: mol_type = other DNA
ggaagaagcagagtacctgaaagtcgacaaaatggtcttgcccttctttt

SEQ ID NO: 64682 - DNA, 50 bp, synthetic construct
  source 1..50: mol_type = other DNA
agcaggagtcggaatccttaagccagattatgccataaatgacttgctat

SEQ ID NO: 64683 - DNA, 50 bp, synthetic construct
  source 1..50: mol_type = other DNA
tcaagagttaatttttctttttttaaaacaaaaagaaacgacaatcttct

SEQ ID NO: 64684 - DNA, 50 bp, synthetic construct
  source 1..50: mol_type = other DNA
caccttaaagctgtatcccggataaatacatgccgtatgtgaactaagta

SEQ ID NO: 64685 - DNA, 50 bp, synthetic construct
  source 1..50: mol_type = other DNA
aggttaaaacaggtttaatattgaaatcaataattaacataattaaccct

SEQ ID NO: 64686 - DNA, 50 bp, synthetic construct
  source 1..50: mol_type = other DNA
tatgatcctgtttattatcctgtggccacattatcaagaactatgaaaac

SEQ ID NO: 64687 - DNA, 50 bp, synthetic construct
  source 1..50: mol_type = other DNA
gctgacttatcaactgctctgaacattttgtacccaagtggtatgtgtgc

SEQ ID NO: 64688 - DNA, 50 bp, synthetic construct
  source 1..50: mol_type = other DNA
acgtatagtttttatttaaaattgtttatagcaaatgattaacaatatct

SEQ ID NO: 64689 - DNA, 50 bp, synthetic construct
  source 1..50: mol_type = other DNA
cataagttcatcactttctttctttaaaggcttttagtggagaagttaaa

SEQ ID NO: 64690 - DNA, 50 bp, synthetic construct
  source 1..50: mol_type = other DNA
gttcagccggaaatacaaaggctatgactggaagcctgatccgaagaact

SEQ ID NO: 64691 - DNA, 50 bp, synthetic construct
  source 1..50: mol_type = other DNA
acttatccatcgcacacgacaaagggtattgagaaccgcagaacataagt

SEQ ID NO: 64692 - DNA, 50 bp, synthetic construct
  source 1..50: mol_type = other DNA
tcaatttttaatgcaaaaaactactagtagtttattttgcaatttactgc

SEQ ID NO: 64693 - DNA, 50 bp, synthetic construct
  source 1..50: mol_type = other DNA
cgtcgtcggtgcggccgccgatccgctgccgcgcatacgtcccatcggcg

SEQ ID NO: 64694 - DNA, 50 bp, synthetic construct
  source 1..50: mol_type = other DNA
ttaaagccaccaaaaatcacacagccaaacgaaatattggaaagaaaaag

SEQ ID NO: 64695 - DNA, 50 bp, synthetic construct
  source 1..50: mol_type = other DNA
ggccttacttctttgtgataattctattattatactaaagataaatataa

SEQ ID NO: 64696 - DNA, 50 bp, synthetic construct
  source 1..50: mol_type = other DNA
cacgcaaaatcgtaaaacagatttttaattctgatgaagtacttttgatt

SEQ ID NO: 64697 - DNA, 50 bp, synthetic construct
  source 1..50: mol_type = other DNA
tgtcaccggtattctaccgttatttatgcaacgggaatatggcagaagta

SEQ ID NO: 64698 - DNA, 50 bp, synthetic construct
  source 1..50: mol_type = other DNA
acaagaagcagctcaatacaattgagaaattgtgttatactatttgagtc

SEQ ID NO: 64699 - DNA, 50 bp, synthetic construct
  source 1..50: mol_type = other DNA
cacgacatgagagaaatatgcaagatctccattccatcgcagatctccgg

SEQ ID NO: 64700 - DNA, 50 bp, synthetic construct
  source 1..50: mol_type = other DNA
ttcaagggtataattatcggtatgacgatttaaattttcatcatcttcaa

SEQ ID NO: 64701 - DNA, 50 bp, synthetic construct
  source 1..50: mol_type = other DNA
atttttcaataacacttgaaaggcaaaaatatcagccgtttttgggtagt

SEQ ID NO: 64702 - DNA, 50 bp, synthetic construct
  source 1..50: mol_type = other DNA
gggttttattttatcccattattcagaaatactgcagtaaaagtgaacag

SEQ ID NO: 64703 - DNA, 50 bp, synthetic construct
  source 1..50: mol_type = other DNA
tatagcaatattgcactcaggcttagaggtctgactgcaagatttttata

SEQ ID NO: 64704 - DNA, 50 bp, synthetic construct
  source 1..50: mol_type = other DNA
cttatacatacggacaacaataccaacatttttttgttttcttgtttaaa

SEQ ID NO: 64705 - DNA, 50 bp, synthetic construct
  source 1..50: mol_type = other DNA
ggaggctcagagacagttagcagatttcataaggacaaatcagatcctta

SEQ ID NO: 64706 - DNA, 50 bp, synthetic construct
  source 1..50: mol_type = other DNA
atacggcaacacgctgttcattttccaaagagaaaggagtggcagagctt

SEQ ID NO: 64707 - DNA, 50 bp, synthetic construct
  source 1..50: mol_type = other DNA
ggtggaacagtaaaagaaattgttttatcaattcgttgacttcccccaaa

SEQ ID NO: 64708 - DNA, 50 bp, synthetic construct
  source 1..50: mol_type = other DNA
ttcaacggggttttaaactggtgagctctgctgttgagcataccatcgaa

SEQ ID NO: 64709 - DNA, 50 bp, synthetic construct
  source 1..50: mol_type = other DNA
tcttggcatagagctgcctcctctcgtgaggagcatacggcgcagcactg

SEQ ID NO: 64710 - DNA, 50 bp, synthetic construct
  source 1..50: mol_type = other DNA
agcctagaaaaatagtgtgttcgggaaggatcaccaacgatttagagggt

SEQ ID NO: 64711 - DNA, 50 bp, synthetic construct
  source 1..50: mol_type = other DNA
tacacggaaaagtgtaaaagaaaaggctttctttctaatctttcccattc

SEQ ID NO: 64712 - DNA, 50 bp, synthetic construct
  source 1..50: mol_type = other DNA
ggcggataaccaatctgagcggctgcagggactctttgagtttattcaat

SEQ ID NO: 64713 - DNA, 50 bp, synthetic construct
  source 1..50: mol_type = other DNA
aatatatcacaaaaaaacattgacttgtcaagagcttttcggaaaaaaat

SEQ ID NO: 64714 - DNA, 50 bp, synthetic construct
  source 1..50: mol_type = other DNA
tgcttatgcttaggtggcaaataatattccttcgtctgcgtatacatcca

SEQ ID NO: 64715 - DNA, 50 bp, synthetic construct
  source 1..50: mol_type = other DNA
cactcacatttgcgtgttgcgattcgaaagataagggccagcaatgagga

SEQ ID NO: 64716 - DNA, 50 bp, synthetic construct
  source 1..50: mol_type = other DNA
acgccgcatattgcccgaacgatcaggaaaaagtaaataatgggacaaag

SEQ ID NO: 64717 - DNA, 50 bp, synthetic construct
  source 1..50: mol_type = other DNA
ttacggttcttgaaaacggcaacattcacctccgttttcaaaaactccct

SEQ ID NO: 64718 - DNA, 50 bp, synthetic construct
  source 1..50: mol_type = other DNA
ttgaaacagcagaattgtattcaacagctaatacaattcagttgttcgga

SEQ ID NO: 64719 - DNA, 50 bp, synthetic construct
  source 1..50: mol_type = other DNA
gcgccgatattccaaagttacacagctgcttaaagcacgatgcatttatg

SEQ ID NO: 64720 - DNA, 50 bp, synthetic construct
  source 1..50: mol_type = other DNA
tatattcatcttaaatcatgaaaaatagaatgatggaaaaaatgaatacg

SEQ ID NO: 64721 - DNA, 50 bp, synthetic construct
  source 1..50: mol_type = other DNA
ggcgtaactatgatcgccatattctcggatatggcgctcctgcttattta

SEQ ID NO: 64722 - DNA, 50 bp, synthetic construct
  source 1..50: mol_type = other DNA
attcgctggcctcctgcacgatcttgtcgatttggcgcagcaatttttcg

SEQ ID NO: 64723 - DNA, 50 bp, synthetic construct
  source 1..50: mol_type = other DNA
cataatatgttataatattatatcgaatatcaatatctgcctgtatgatg

SEQ ID NO: 64724 - DNA, 50 bp, synthetic construct
  source 1..50: mol_type = other DNA
aataaaattttatttaccataaaattttttatgcttaagactgtaatata

SEQ ID NO: 64725 - DNA, 50 bp, synthetic construct
  source 1..50: mol_type = other DNA
cttttgctttttccataaaataatacccttttttagaaaaaaatagaaag

SEQ ID NO: 64726 - DNA, 50 bp, synthetic construct
  source 1..50: mol_type = other DNA
atagaataaacctcctttatttaaattctaactcatcttctaaattatat

SEQ ID NO: 64727 - DNA, 50 bp, synthetic construct
  source 1..50: mol_type = other DNA
acaagaagcttaacatcttcttgtaaacaagaagcttaacatcttcttgt

SEQ ID NO: 64728 - DNA, 50 bp, synthetic construct
  source 1..50: mol_type = other DNA
gttccatttttccctccgactaaaatttttgttttagcgaaaacttacac

SEQ ID NO: 64729 - DNA, 50 bp, synthetic construct
  source 1..50: mol_type = other DNA
tgggcgcaggaggttttcgggaacaagtttattgtatcatagctccctga

SEQ ID NO: 64730 - DNA, 50 bp, synthetic construct
  source 1..50: mol_type = other DNA
tcttttggcaaatccacctccatcgattattttctggaggtctacgcatg

SEQ ID NO: 64731 - DNA, 50 bp, synthetic construct
  source 1..50: mol_type = other DNA
ccctcgggttgataggtaacatctatagatataacaaatacaccaccggc

SEQ ID NO: 64732 - DNA, 50 bp, synthetic construct
  source 1..50: mol_type = other DNA
tgatttgcttgaatattgtagataatcctacacaggtcgtggagaaagta

SEQ ID NO: 64733 - DNA, 50 bp, synthetic construct
  source 1..50: mol_type = other DNA
taaaaacgagagtcggtggagtaaaatacctctttccaatttcgtttaat

SEQ ID NO: 64734 - DNA, 50 bp, synthetic construct
  source 1..50: mol_type = other DNA
acctcgctttctttgctaccatatatctttttctgcaagaaatccacggt

SEQ ID NO: 64735 - DNA, 50 bp, synthetic construct
  source 1..50: mol_type = other DNA
tttacgattgatttgccttatctagaggaataaaaacaatggcacccaaa

SEQ ID NO: 64736 - DNA, 50 bp, synthetic construct
  source 1..50: mol_type = other DNA
cagtagcagaactgataaaaatttgtaaatttttttaggttcggggcctt

SEQ ID NO: 64737 - DNA, 50 bp, synthetic construct
  source 1..50: mol_type = other DNA
aaaatacatttccaaaaaagttggaacttgacgcaaaagaaaagtttttt

SEQ ID NO: 64738 - DNA, 50 bp, synthetic construct
  source 1..50: mol_type = other DNA
tcacatattaccgttatagtacctataaattctctatcgttattatgtgc

SEQ ID NO: 64739 - DNA, 50 bp, synthetic construct
  source 1..50: mol_type = other DNA
ttaaaatttaataaagtgcagtcactgcccaaaactttacaatcttttac

SEQ ID NO: 64740 - DNA, 50 bp, synthetic construct
  source 1..50: mol_type = other DNA
tgtttcatattaaaactccctatctagatattaatttttataataaagtt

SEQ ID NO: 64741 - DNA, 50 bp, synthetic construct
  source 1..50: mol_type = other DNA
acgaactatgccgcagatgtttatcgacaaaggaatgccgatagaacagg

SEQ ID NO: 64742 - DNA, 50 bp, synthetic construct
  source 1..50: mol_type = other DNA
aaaaacatcccgctggcggttatcatgataatcccgctctattcgtttct

SEQ ID NO: 64743 - DNA, 50 bp, synthetic construct
  source 1..50: mol_type = other DNA
cgaaccataacgacctcgtgagattcgtgtagtatattccgctgaaatcg

SEQ ID NO: 64744 - DNA, 50 bp, synthetic construct
  source 1..50: mol_type = other DNA
ccgttctgctgaccgtttgcagggggaggaataagaaatgagcagaacgg

SEQ ID NO: 64745 - DNA, 50 bp, synthetic construct
  source 1..50: mol_type = other DNA
tctgattgtcgataccggcgatctgaggatcgcgatgatcgcaatcgtga

SEQ ID NO: 64746 - DNA, 50 bp, synthetic construct
  source 1..50: mol_type = other DNA
caaactataaatgtattctgcctgcttggttacaacttctgccttctttt

SEQ ID NO: 64747 - DNA, 50 bp, synthetic construct
  source 1..50: mol_type = other DNA
tcgcatagatagggagagaaaataaggctcttctctgaaaatctatccgt

SEQ ID NO: 64748 - DNA, 50 bp, synthetic construct
  source 1..50: mol_type = other DNA
actggctttaatgcacttccatggtaacatggataaatcacagataaagc

SEQ ID NO: 64749 - DNA, 50 bp, synthetic construct
  source 1..50: mol_type = other DNA
cattcgtgatgcagacagacggatataacttacaatcatgttgccacgag

SEQ ID NO: 64750 - DNA, 50 bp, synthetic construct
  source 1..50: mol_type = other DNA
aaatacttttattgaagaggaaattccatttttatttcttaaaaggtgtt

SEQ ID NO: 64751 - DNA, 50 bp, synthetic construct
  source 1..50: mol_type = other DNA
aaattggcaaagacagtaagagccatgccaatcatcctctttttgaattt

SEQ ID NO: 64752 - DNA, 50 bp, synthetic construct
  source 1..50: mol_type = other DNA
agagaaaaggaaggattctctgccgtagcagaggtgcttcacgttagcat

SEQ ID NO: 64753 - DNA, 50 bp, synthetic construct
  source 1..50: mol_type = other DNA
ccgattaacagccggaagaagcggagatgctacatattcctgttatgagc

SEQ ID NO: 64754 - DNA, 50 bp, synthetic construct
  source 1..50: mol_type = other DNA
gtttaacctgattatggccgatttttaaatcaaacataacgataatattg

SEQ ID NO: 64755 - DNA, 50 bp, synthetic construct
  source 1..50: mol_type = other DNA
ttcacgctcttcgaggagctttgcactacggtctcctccttgtcgtcctg

SEQ ID NO: 64756 - DNA, 50 bp, synthetic construct
  source 1..50: mol_type = other DNA
aaaaactgaattgtgaattagaaaatttttaaattcacaaaataaagtga

SEQ ID NO: 64757 - DNA, 50 bp, synthetic construct
  source 1..50: mol_type = other DNA
atatataataatattaaagaaaatatattattgaaaagattgaggtatat

SEQ ID NO: 64758 - DNA, 50 bp, synthetic construct
  source 1..50: mol_type = other DNA
cgccgtttttcctactctctattgcataatagagagaaagccccttggtc

SEQ ID NO: 64759 - DNA, 50 bp, synthetic construct
  source 1..50: mol_type = other DNA
tatttctatcattaatgagcttattcgttagctcgtaaatgatagaaata

SEQ ID NO: 64760 - DNA, 50 bp, synthetic construct
  source 1..50: mol_type = other DNA
aaagcgtcaacaatggcaagcagaacgaacaaatatattgaaacatcttt

SEQ ID NO: 64761 - DNA, 50 bp, synthetic construct
  source 1..50: mol_type = other DNA
agttttacgatctttgcttccccttcaggggatggggagaaatcaaaaaa

SEQ ID NO: 64762 - DNA, 50 bp, synthetic construct
  source 1..50: mol_type = other DNA
cttggcggaaagccgttcggcggtaaacttatcgttccctttccgccgtt

SEQ ID NO: 64763 - DNA, 50 bp, synthetic construct
  source 1..50: mol_type = other DNA
cggcctcttgaaccccattcaagcgcggtcaggcggtcgtcctgcttttt

SEQ ID NO: 64764 - DNA, 50 bp, synthetic construct
  source 1..50: mol_type = other DNA
tttcagtttggtgtaactgccctttgtgaaagagcgccgtaatgatacaa

SEQ ID NO: 64765 - DNA, 50 bp, synthetic construct
  source 1..50: mol_type = other DNA
cagacctgctgtgccgctccggtattatccgccacatcgataaacatctg

SEQ ID NO: 64766 - DNA, 50 bp, synthetic construct
  source 1..50: mol_type = other DNA
tcataagtcatgatgatcacataatcagtcgctctgctcatctgctatgc

SEQ ID NO: 64767 - DNA, 50 bp, synthetic construct
  source 1..50: mol_type = other DNA
aaaaagaaactggacacccgcttcgagaggaatttggaatatcttcgtgt

SEQ ID NO: 64768 - DNA, 50 bp, synthetic construct
  source 1..50: mol_type = other DNA
gccgaggaataattaaaagatgcacaacgctcatttttacggagcaacga

SEQ ID NO: 64769 - DNA, 50 bp, synthetic construct
  source 1..50: mol_type = other DNA
aataataaatccgcaaattgtgaatatttgcattttatttttttcatgtt

SEQ ID NO: 64770 - DNA, 50 bp, synthetic construct
  source 1..50: mol_type = other DNA
caataatttaaaattattttctttattcttgcaatatttttataatatta

SEQ ID NO: 64771 - DNA, 50 bp, synthetic construct
  source 1..50: mol_type = other DNA
tttaggcataagcataaaaagagcctccttctttttcagtgtctccggaa

SEQ ID NO: 64772 - DNA, 50 bp, synthetic construct
  source 1..50: mol_type = other DNA
tcctgttatgcttattatcctgtggccggcggataaatcggattcccaat

SEQ ID NO: 64773 - DNA, 50 bp, synthetic construct
  source 1..50: mol_type = other DNA
tcaatagctaagattgtaagagccgtcgcctgagggtgaagaggatatgc

SEQ ID NO: 64774 - DNA, 50 bp, synthetic construct
  source 1..50: mol_type = other DNA
aattgcttttttcattttggttattatctacaaaaaagatccgcgctttg

SEQ ID NO: 64775 - DNA, 50 bp, synthetic construct
  source 1..50: mol_type = other DNA
ctcatatataaaacaacattcattgccttgaatgtttctttatctataat

SEQ ID NO: 64776 - DNA, 50 bp, synthetic construct
  source 1..50: mol_type = other DNA
gtcggaaaacctcaaaaaattcagtactgcgacatacaaaaagacataac

SEQ ID NO: 64777 - DNA, 50 bp, synthetic construct
  source 1..50: mol_type = other DNA
cgttaaatgtgcaggatcgctctgatcattaaatatcagcagtcttgcaa

SEQ ID NO: 64778 - DNA, 50 bp, synthetic construct
  source 1..50: mol_type = other DNA
aatccagtggcagcagcttcacgccgaagttcagccccgtctagaacggg

SEQ ID NO: 64779 - DNA, 50 bp, synthetic construct
  source 1..50: mol_type = other DNA
agggagtttttgaaaacggaggtgaatattgccgttttcaagaaccgtaa

SEQ ID NO: 64780 - DNA, 50 bp, synthetic construct
  source 1..50: mol_type = other DNA
tagtggaatcaaattcatctataaaatattaaaagaattaaggcacacgg

SEQ ID NO: 64781 - DNA, 50 bp, synthetic construct
  source 1..50: mol_type = other DNA
tagtcagtcactctatccagctgagctacgtctatccgattaataaactc

SEQ ID NO: 64782 - DNA, 50 bp, synthetic construct
  source 1..50: mol_type = other DNA
cctcctgtttgcttgtatatatggttcaccatatctaaagaaacagtcac

SEQ ID NO: 64783 - DNA, 50 bp, synthetic construct
  source 1..50: mol_type = other DNA
cagaaaatgttaaatcagctggcttgcgccgactgatttaacttcagtcc

SEQ ID NO: 64784 - DNA, 50 bp, synthetic construct
  source 1..50: mol_type = other DNA
gattaaaaaggcaatgcatataaccaagtggtatgtgtgccattttaatc

SEQ ID NO: 64785 - DNA, 50 bp, synthetic construct
  source 1..50: mol_type = other DNA
ggagtggtaggcgaaccgtagcaaaattcctacattgggcctatagctca

SEQ ID NO: 64786 - DNA, 50 bp, synthetic construct
  source 1..50: mol_type = other DNA
tggcaagaatcattgaaatagtagccgtatgcagagaggaggcactgcat

SEQ ID NO: 64787 - DNA, 50 bp, synthetic construct
  source 1..50: mol_type = other DNA
ctgaaatttcttctttacattttggagttaatcgagagaataaatatcta

SEQ ID NO: 64788 - DNA, 50 bp, synthetic construct
  source 1..50: mol_type = other DNA
tacaatgacttttttgcaacgccaggtcgcccatgaaaaaagtttttgtg

SEQ ID NO: 64789 - DNA, 50 bp, synthetic construct
  source 1..50: mol_type = other DNA
gcacctgttatgttagatacaatgagccatatataaaagcaaacaggagg

SEQ ID NO: 64790 - DNA, 50 bp, synthetic construct
  source 1..50: mol_type = other DNA
cttaaatttttaaaaattgcatagttaataaaaatttttaaatcattgag

SEQ ID NO: 64791 - DNA, 50 bp, synthetic construct
  source 1..50: mol_type = other DNA
aaaacaggcttaacaaactttatatttataatgtctgatattgctgttat

SEQ ID NO: 64792 - DNA, 50 bp, synthetic construct
  source 1..50: mol_type = other DNA
ccggcacactacatgcaatcggaaaactattgtggtatggtgtgtcgtgc

SEQ ID NO: 64793 - DNA, 50 bp, synthetic construct
  source 1..50: mol_type = other DNA
aagttcaagatttttcgtaagggaacaaatacggacaaaagcaaaaacga

SEQ ID NO: 64794 - DNA, 50 bp, synthetic construct
  source 1..50: mol_type = other DNA
tgatctgggtctgacaatgaccgctgatgccgtttgccagacccaccagc

SEQ ID NO: 64795 - DNA, 50 bp, synthetic construct
  source 1..50: mol_type = other DNA
aataagagcagatggacgctgtaaggagacacctacactgagctcttttc

SEQ ID NO: 64796 - DNA, 50 bp, synthetic construct
  source 1..50: mol_type = other DNA
tactgcatttgtcattttaattacctgtaattatctgttaaaaaaaagtt

SEQ ID NO: 64797 - DNA, 50 bp, synthetic construct
  source 1..50: mol_type = other DNA
cccctgccatgatcgggcagttctgcggactgcccctatcgtgagaaagg

SEQ ID NO: 64798 - DNA, 50 bp, synthetic construct
  source 1..50: mol_type = other DNA
gcaaacttatcgattacgcgacgaaaactttccgttttgacggggtttcg

SEQ ID NO: 64799 - DNA, 50 bp, synthetic construct
  source 1..50: mol_type = other DNA
gttataacttcaccatcacgacatccttgatgcatcaacatatttcagta

SEQ ID NO: 64800 - DNA, 50 bp, synthetic construct
  source 1..50: mol_type = other DNA
ctttgggtagtctatatatcactctgttttcatatatagcactctcttta

SEQ ID NO: 64801 - DNA, 50 bp, synthetic construct
  source 1..50: mol_type = other DNA
atcggcggcgacatcgactgaggagagctaagcagatcacattagccgat

SEQ ID NO: 64802 - DNA, 50 bp, synthetic construct
  source 1..50: mol_type = other DNA
aggtattccatgagcgtaagaagaaggtcctgaacgaccccaaatggcaa

SEQ ID NO: 64803 - DNA, 50 bp, synthetic construct
  source 1..50: mol_type = other DNA
agtataaatacttatattgatgaaaatctgcccttatagttaggccgcaa

SEQ ID NO: 64804 - DNA, 50 bp, synthetic construct
  source 1..50: mol_type = other DNA
atcaatctcctttcagttgttcagtaaaaaaagtataaaaagatgttgac

SEQ ID NO: 64805 - DNA, 50 bp, synthetic construct
  source 1..50: mol_type = other DNA
ttctttgtgataattctatttacaattgaaaataaccttaccataaccaa

SEQ ID NO: 64806 - DNA, 50 bp, synthetic construct
  source 1..50: mol_type = other DNA
attaagaggtatcttcgtgataacaggatatgtcggagatatatgttaaa

SEQ ID NO: 64807 - DNA, 50 bp, synthetic construct
  source 1..50: mol_type = other DNA
cggaggtggacgcaagctgaccttgcagcccttgtactcgttatgctcct

SEQ ID NO: 64808 - DNA, 50 bp, synthetic construct
  source 1..50: mol_type = other DNA
taccggcaaccgtaaatcccttgacgtcaagggtgtcgtatgccataaat

SEQ ID NO: 64809 - DNA, 50 bp, synthetic construct
  source 1..50: mol_type = other DNA
taaggttaaagtgaggcaataaaacgttttttaaacctttttttactctt

SEQ ID NO: 64810 - DNA, 50 bp, synthetic construct
  source 1..50: mol_type = other DNA
atatgcaagatgctttttgcaatttctggagatataaacatcttccttat

SEQ ID NO: 64811 - DNA, 50 bp, synthetic construct
  source 1..50: mol_type = other DNA
gtaatttaactttagctccatattcgaatagtttatacggaaacctttat

SEQ ID NO: 64812 - DNA, 50 bp, synthetic construct
  source 1..50: mol_type = other DNA
cttggcataaactgaaaaaaatacggcaagatagatcttatcgttacaaa

SEQ ID NO: 64813 - DNA, 50 bp, synthetic construct
  source 1..50: mol_type = other DNA
aaggattggtgagtagagtggagcatattcccgtagcactcatcaattgt

SEQ ID NO: 64814 - DNA, 50 bp, synthetic construct
  source 1..50: mol_type = other DNA
atttggagccaacaacgcatgaacaagtgtggtaatgtttgtgtcacaaa

SEQ ID NO: 64815 - DNA, 50 bp, synthetic construct
  source 1..50: mol_type = other DNA
gttgattggtatggacaatgccaacctcggtatcgtccatttatataaaa

SEQ ID NO: 64816 - DNA, 50 bp, synthetic construct
  source 1..50: mol_type = other DNA
tagggacactgagcttgcaaaaatgcttattcgcgaaataagttaaaaag

SEQ ID NO: 64817 - DNA, 50 bp, synthetic construct
  source 1..50: mol_type = other DNA
tttatttatcataaaattaccagctatggagtctctgtatgttatatagc

SEQ ID NO: 64818 - DNA, 50 bp, synthetic construct
  source 1..50: mol_type = other DNA
ctgctcgctgaacaccagcagacagcgttctgctgggcgtctgctgcttc

SEQ ID NO: 64819 - DNA, 50 bp, synthetic construct
  source 1..50: mol_type = other DNA
tatttctgatgacgccgcaggtctgcaggaaagcggctccgggcctttta

SEQ ID NO: 64820 - DNA, 50 bp, synthetic construct
  source 1..50: mol_type = other DNA
tggcaaaacgtccaaatattaccgcgcgtaaattcagcgattccgcaaat

SEQ ID NO: 64821 - DNA, 50 bp, synthetic construct
  source 1..50: mol_type = other DNA
atggtataaaaaataaaaccaatgcaaaactgtgatatttcagaaaccag

SEQ ID NO: 64822 - DNA, 50 bp, synthetic construct
  source 1..50: mol_type = other DNA
gccaggagatgatcacagggctgacgaatgcggccggaaccccaccatta

SEQ ID NO: 64823 - DNA, 50 bp, synthetic construct
  source 1..50: mol_type = other DNA
cggaggtggaagttatgcttaccgagtaaaaagcatagttttatcctcta

SEQ ID NO: 64824 - DNA, 50 bp, synthetic construct
  source 1..50: mol_type = other DNA
tttaaaagagcatccttacataaaaatttatagggagatttatttgtaag

SEQ ID NO: 64825 - DNA, 50 bp, synthetic construct
  source 1..50: mol_type = other DNA
gattcagattcagatatccggttaaaaatccggatatcctgctctgtgat

SEQ ID NO: 64826 - DNA, 50 bp, synthetic construct
  source 1..50: mol_type = other DNA
ggcggctgctttcatttcgtctgtcctgtccgattttgacggcagtttgc

SEQ ID NO: 64827 - DNA, 50 bp, synthetic construct
  source 1..50: mol_type = other DNA
atagtttggctttaccggtttttgcaggaatcatggtaactttaggcatt

SEQ ID NO: 64828 - DNA, 50 bp, synthetic construct
  source 1..50: mol_type = other DNA
gctgttgtttgaaactgattttacacgtccaactcgtttcacaaaccagc

SEQ ID NO: 64829 - DNA, 50 bp, synthetic construct
  source 1..50: mol_type = other DNA
cgtgatatagaaatccgcaccaaaaatatgtgttgccttattatagcaca

SEQ ID NO: 64830 - DNA, 50 bp, synthetic construct
  source 1..50: mol_type = other DNA
catcaatggcatagtggtgatagccgaccgtactgcctttgccattatga

SEQ ID NO: 64831 - DNA, 50 bp, synthetic construct
  source 1..50: mol_type = other DNA
aaaatagaaaggacgcaaagataatgggaaccatgccgccctttgacgtg

SEQ ID NO: 64832 - DNA, 50 bp, synthetic construct
  source 1..50: mol_type = other DNA
ggaggaaattcgcatgatttatgtgacactatctttggcggctttgcacc

SEQ ID NO: 64833 - DNA, 50 bp, synthetic construct
  source 1..50: mol_type = other DNA
ggctgcacaacaacttcgcccagcgggtgtagcgcagttttggtagcgcg

SEQ ID NO: 64834 - DNA, 50 bp, synthetic construct
  source 1..50: mol_type = other DNA
ataaagggttttttgttatttccaaaaggaaataagaaatcaagacagat

SEQ ID NO: 64835 - DNA, 50 bp, synthetic construct
  source 1..50: mol_type = other DNA
cggcggtcatagactcacttccttttgtcgaaagaagtcgaaaacgcaaa

SEQ ID NO: 64836 - DNA, 50 bp, synthetic construct
  source 1..50: mol_type = other DNA
tccctttcatgaaaaaagcgtttgtcataccgaggacttcagccagatct

SEQ ID NO: 64837 - DNA, 50 bp, synthetic construct
  source 1..50: mol_type = other DNA
caaaagagctactgttgtcaggatacaaaccaaccccactacctttttag

SEQ ID NO: 64838 - DNA, 50 bp, synthetic construct
  source 1..50: mol_type = other DNA
agatggatcagaagaacctgtatttctctcgatttgcttatgaaccatca

SEQ ID NO: 64839 - DNA, 50 bp, synthetic construct
  source 1..50: mol_type = other DNA
agataatgatagctgaagaaaaagcagctggaggatcagagccagtatca

SEQ ID NO: 64840 - DNA, 50 bp, synthetic construct
  source 1..50: mol_type = other DNA
tgtattttagtctaactaatcatgattattatcaattagaccaaaataca

SEQ ID NO: 64841 - DNA, 50 bp, synthetic construct
  source 1..50: mol_type = other DNA
gacaaatatcacgcctcttagatttatatcacctccagggtgtatttgtc

SEQ ID NO: 64842 - DNA, 50 bp, synthetic construct
  source 1..50: mol_type = other DNA
gtataaagaattttagtaacctacatcaaggatactaaaatttttgatat

SEQ ID NO: 64843 - DNA, 50 bp, synthetic construct
  source 1..50: mol_type = other DNA
gtaatctacccggtactttgtttttttttcaaaatcgttgcctattttct

SEQ ID NO: 64844 - DNA, 50 bp, synthetic construct
  source 1..50: mol_type = other DNA
aggtcgattggaaattctttcatgcacatgaattatgaaaaactctccgg

SEQ ID NO: 64845 - DNA, 50 bp, synthetic construct
  source 1..50: mol_type = other DNA
acatgagtatatttaagattcaatatccagattcttcaaatactccactg

SEQ ID NO: 64846 - DNA, 50 bp, synthetic construct
  source 1..50: mol_type = other DNA
tcgactcctccttgtgatttatttaaaaagaaataagacggaggataccg

SEQ ID NO: 64847 - DNA, 50 bp, synthetic construct
  source 1..50: mol_type = other DNA
ggaagtatacggctgggaagcagccagcagcctgtttaccggcagctttg

SEQ ID NO: 64848 - DNA, 50 bp, synthetic construct
  source 1..50: mol_type = other DNA
aacatgtttgaaatcgtagcagaaatgtctgctttttacttgaaaaaaac

SEQ ID NO: 64849 - DNA, 50 bp, synthetic construct
  source 1..50: mol_type = other DNA
aaatctgctataatacaggtgcgtttgtattagagtatgacgtaagttat

SEQ ID NO: 64850 - DNA, 50 bp, synthetic construct
  source 1..50: mol_type = other DNA
gaacacttttttatattgtatcaacagtgatagaaaggaacgaatatggg

SEQ ID NO: 64851 - DNA, 50 bp, synthetic construct
  source 1..50: mol_type = other DNA
atgcgaaaatgtctttcacgattggtagggtttagttgacatttgggcat

SEQ ID NO: 64852 - DNA, 50 bp, synthetic construct
  source 1..50: mol_type = other DNA
gaaatatctccaaaatgaaagagtattaatttttattgtaaagatgccgg

SEQ ID NO: 64853 - DNA, 50 bp, synthetic construct
  source 1..50: mol_type = other DNA
ctttttcaaaacatacacctcctttcttgtagcatcaaaatatgttaaaa

SEQ ID NO: 64854 - DNA, 50 bp, synthetic construct
  source 1..50: mol_type = other DNA
gccctcttttcatcacaacggagcatattccgtagtactttaaaggcggt

SEQ ID NO: 64855 - DNA, 50 bp, synthetic construct
  source 1..50: mol_type = other DNA
caggcaaagggcattgacttcattccgagaaggtcggaatccttcaggca

SEQ ID NO: 64856 - DNA, 50 bp, synthetic construct
  source 1..50: mol_type = other DNA
tttcctttgcgggcattgtggtcggcatatcaggcggccagcgcagatga

SEQ ID NO: 64857 - DNA, 50 bp, synthetic construct
  source 1..50: mol_type = other DNA
aatgatttgttcattttgtctgattagtctggcaaaaatgtcaggctatt

SEQ ID NO: 64858 - DNA, 50 bp, synthetic construct
  source 1..50: mol_type = other DNA
ggtacgctgaagtaaaggctttgggctggaagcccttaaccaagacaacg

SEQ ID NO: 64859 - DNA, 50 bp, synthetic construct
  source 1..50: mol_type = other DNA
ttgtcttggttgctttacatggaactttttttgcaaagcaaccaacaaaa

SEQ ID NO: 64860 - DNA, 50 bp, synthetic construct
  source 1..50: mol_type = other DNA
tttatagggtactactgctaatcttttcattaccacttcgtccctattaa

SEQ ID NO: 64861 - DNA, 50 bp, synthetic construct
  source 1..50: mol_type = other DNA
caaattgacaaagccatacacacgcacctccgggcaggcttgtcaaagtg

SEQ ID NO: 64862 - DNA, 50 bp, synthetic construct
  source 1..50: mol_type = other DNA
tccttcggctctatcacgatattcggtggtatttatgcctcgcaaaaaga

SEQ ID NO: 64863 - DNA, 50 bp, synthetic construct
  source 1..50: mol_type = other DNA
catgaaagttcacacaaaaagtaaaagtcaaattcttatgaactgcgtct

SEQ ID NO: 64864 - DNA, 50 bp, synthetic construct
  source 1..50: mol_type = other DNA
ctttaccgagctgcagggcattggcgatatccgggtgtagcgcagttttg

SEQ ID NO: 64865 - DNA, 50 bp, synthetic construct
  source 1..50: mol_type = other DNA
atattttttacccttgatagatcaagtggtctatcatatttaaacgagaa

SEQ ID NO: 64866 - DNA, 50 bp, synthetic construct
  source 1..50: mol_type = other DNA
tattcatttcgcatttccaacgaatattccttggatttgggcaacggtaa

SEQ ID NO: 64867 - DNA, 50 bp, synthetic construct
  source 1..50: mol_type = other DNA
tctaacgctacatacccaaatggctgattatatggcgatgaatctgtttg

SEQ ID NO: 64868 - DNA, 50 bp, synthetic construct
  source 1..50: mol_type = other DNA
tcgtccggtgttttactttgttggtattagctgggcaaatgtcaatgcgt

SEQ ID NO: 64869 - DNA, 50 bp, synthetic construct
  source 1..50: mol_type = other DNA
gagagacatttgcctcccaccgaaagaaagagaggaccgaaacggccctc

SEQ ID NO: 64870 - DNA, 50 bp, synthetic construct
  source 1..50: mol_type = other DNA
gttttcgctgattccttccgttacaggtatgtcgcgggcgcaagtaaata

SEQ ID NO: 64871 - DNA, 50 bp, synthetic construct
  source 1..50: mol_type = other DNA
accgttaggtctttcatcatttgttcaacatgacgcaagacggttatttg

SEQ ID NO: 64872 - DNA, 50 bp, synthetic construct
  source 1..50: mol_type = other DNA
cacatctgaggaatgcttcgcaaagtaaaagaaaacacgcctcgcaagag

SEQ ID NO: 64873 - DNA, 50 bp, synthetic construct
  source 1..50: mol_type = other DNA
acctcgaatgttactataaaggaatttatgaagctaccgcggtgtagtgc

SEQ ID NO: 64874 - DNA, 50 bp, synthetic construct
  source 1..50: mol_type = other DNA
ttgtgttacctcctctatgtcaacttgatgacattcgtgacataatcgga

SEQ ID NO: 64875 - DNA, 50 bp, synthetic construct
  source 1..50: mol_type = other DNA
ccggatgggtatcaagataaagcataggtgttatttttatacccattttt

SEQ ID NO: 64876 - DNA, 50 bp, synthetic construct
  source 1..50: mol_type = other DNA
gtagcttcatgttacgcccatatgcgcaaatgttgaactggtgaagcagc

SEQ ID NO: 64877 - DNA, 50 bp, synthetic construct
  source 1..50: mol_type = other DNA
aactgtcattcaatttagggagcatttgctcccctgtgtaaataaaaaaa

SEQ ID NO: 64878 - DNA, 50 bp, synthetic construct
  source 1..50: mol_type = other DNA
gtaggctaaaaaatttgtcccgcccgtttggcaacttgtttttggcaaag

SEQ ID NO: 64879 - DNA, 50 bp, synthetic construct
  source 1..50: mol_type = other DNA
taaaagacagctgtaccttctaacgcggccaatgcaaccgctatcttttt

SEQ ID NO: 64880 - DNA, 50 bp, synthetic construct
  source 1..50: mol_type = other DNA
acgtcctgggcgattgcctccgcggcataactgaaaatcccccgctggca

SEQ ID NO: 64881 - DNA, 50 bp, synthetic construct
  source 1..50: mol_type = other DNA
cggcattgcaaccgtaaacggcagtacaatactcatacattgcaatgccc

SEQ ID NO: 64882 - DNA, 50 bp, synthetic construct
  source 1..50: mol_type = other DNA
ttatttttaaattgtaaaattacagtacctattttatcatttttaaataa

SEQ ID NO: 64883 - DNA, 50 bp, synthetic construct
  source 1..50: mol_type = other DNA
cagggctacattgaccagattttatataagggattcagagctaatatgtg

SEQ ID NO: 64884 - DNA, 50 bp, synthetic construct
  source 1..50: mol_type = other DNA
gctgtgcctctcgtgtgctcacacgtgtgcaaagtttcgagcggcaaagc

SEQ ID NO: 64885 - DNA, 50 bp, synthetic construct
  source 1..50: mol_type = other DNA
gtgtttcatagaggatgaaagccacaaagctctcatcctgctcgttacga

SEQ ID NO: 64886 - DNA, 50 bp, synthetic construct
  source 1..50: mol_type = other DNA
ggactaaatcaaacattgactctgaaataagtcaatgttgtattagttcg

SEQ ID NO: 64887 - DNA, 50 bp, synthetic construct
  source 1..50: mol_type = other DNA
gggcgtatttttgtcgattttattgtgaggatggtgacaaaatatgttga

SEQ ID NO: 64888 - DNA, 50 bp, synthetic construct
  source 1..50: mol_type = other DNA
gcgtacagtgcttagcaatgaaaaattttttatgcctaaatataacccgg

SEQ ID NO: 64889 - DNA, 50 bp, synthetic construct
  source 1..50: mol_type = other DNA
tcctttatataacaactcacacgtattcctgtcgcgaaatatacaaaaca

SEQ ID NO: 64890 - DNA, 50 bp, synthetic construct
  source 1..50: mol_type = other DNA
tggctttttgaaaacagagggtgcattggaacttgcggtcgcaaaaggca

SEQ ID NO: 64891 - DNA, 50 bp, synthetic construct
  source 1..50: mol_type = other DNA
tggtcctgattgattgcccgccggcacctgcactgccgcaatctggacgc

SEQ ID NO: 64892 - DNA, 50 bp, synthetic construct
  source 1..50: mol_type = other DNA
cttctcatcgtccattcgcctccttgtttttctttgcagacgtttcgaag

SEQ ID NO: 64893 - DNA, 50 bp, synthetic construct
  source 1..50: mol_type = other DNA
gagcacagttccagtatcaacgaaaatttattgacactggcggggatgac

SEQ ID NO: 64894 - DNA, 50 bp, synthetic construct
  source 1..50: mol_type = other DNA
ccttgccgaatccatcgcaggattgctatcgtgcggatagtacgggaata

SEQ ID NO: 64895 - DNA, 50 bp, synthetic construct
  source 1..50: mol_type = other DNA
gtgacaaatttactaaccttgattgaaatgaaggatagtaaaattcttta

SEQ ID NO: 64896 - DNA, 50 bp, synthetic construct
  source 1..50: mol_type = other DNA
gctaggcacttcaacttttggttagttttaaaaataaaaaaggccatagc

SEQ ID NO: 64897 - DNA, 50 bp, synthetic construct
  source 1..50: mol_type = other DNA
attcattcctggatatttatcaatatccgcatagatatcaaccaactcgt

SEQ ID NO: 64898 - DNA, 50 bp, synthetic construct
  source 1..50: mol_type = other DNA
ttcttgctcatggcattcgcggcacaatccggttgacactttcgtttcag

SEQ ID NO: 64899 - DNA, 50 bp, synthetic construct
  source 1..50: mol_type = other DNA
caggggtcagcataaccggacaaccggtgcgcctgtggggctggttgtct

SEQ ID NO: 64900 - DNA, 50 bp, synthetic construct
  source 1..50: mol_type = other DNA
tgctggtttttttatcaataattttaaaattatttatattttccacttga

SEQ ID NO: 64901 - DNA, 50 bp, synthetic construct
  source 1..50: mol_type = other DNA
acctgccttcggtggcagcacggaaatccggccagccgcccaagcctttt

SEQ ID NO: 64902 - DNA, 50 bp, synthetic construct
  source 1..50: mol_type = other DNA
gtggctttgcccgttcccggtatcagattacacggacatggcaagaccgc

SEQ ID NO: 64903 - DNA, 50 bp, synthetic construct
  source 1..50: mol_type = other DNA
atccaactctttttccattttgtttagtttgagcaaaaaaagagccaaat

SEQ ID NO: 64904 - DNA, 50 bp, synthetic construct
  source 1..50: mol_type = other DNA
tttgcatcaaaacgagtgtaaacaattaccttaactactttatttgccat

SEQ ID NO: 64905 - DNA, 50 bp, synthetic construct
  source 1..50: mol_type = other DNA
acaagctattacaaaatgacggttataattatacccttgaaaccgctaaa

SEQ ID NO: 64906 - DNA, 50 bp, synthetic construct
  source 1..50: mol_type = other DNA
atttaaatcactccttgacattttcaaaaatgctctgcttatttttaaag

SEQ ID NO: 64907 - DNA, 50 bp, synthetic construct
  source 1..50: mol_type = other DNA
ctgtcgtttcttgcaccttttacccattagaaaggagcaagcataatgcc

SEQ ID NO: 64908 - DNA, 50 bp, synthetic construct
  source 1..50: mol_type = other DNA
agcttcagaacagttgtaaagctctgaatatctactactgcaaatctatc

SEQ ID NO: 64909 - DNA, 50 bp, synthetic construct
  source 1..50: mol_type = other DNA
cttacaatagttcccgcgctatgtattcatttatgataaactatattatg

SEQ ID NO: 64910 - DNA, 50 bp, synthetic construct
  source 1..50: mol_type = other DNA
cagaaaaatggcattgacaaaaatttatttttgtttggtccacctgacgc

SEQ ID NO: 64911 - DNA, 50 bp, synthetic construct
  source 1..50: mol_type = other DNA
ttattgagtttcataatcttttagacggaaatgcttatttattttaatct

SEQ ID NO: 64912 - DNA, 50 bp, synthetic construct
  source 1..50: mol_type = other DNA
tccttctttaatgttacgcaaaaatatcggagtatagaattaattggttt

SEQ ID NO: 64913 - DNA, 50 bp, synthetic construct
  source 1..50: mol_type = other DNA
gtttgcttgtatatacggttcaaacttgagaaatatggctttaagcacat

SEQ ID NO: 64914 - DNA, 50 bp, synthetic construct
  source 1..50: mol_type = other DNA
actctaatttccctttcagttgaaacagagcatgagaatcaaggtaatca

SEQ ID NO: 64915 - DNA, 50 bp, synthetic construct
  source 1..50: mol_type = other DNA
ggtattcagattttcgttttcaaaaatatgaagatgaatatgggatgcgg

SEQ ID NO: 64916 - DNA, 50 bp, synthetic construct
  source 1..50: mol_type = other DNA
caaaaagagccgcaatcatgcggctcgctttgatattgctgatctataat

SEQ ID NO: 64917 - DNA, 50 bp, synthetic construct
  source 1..50: mol_type = other DNA
tatcaaacggagaaacggcatagccgggtacgaacttcaaccgtccgagt

SEQ ID NO: 64918 - DNA, 50 bp, synthetic construct
  source 1..50: mol_type = other DNA
tttctctaatttgtatattgaaaacaaacacaatacacaaatcagacaat

SEQ ID NO: 64919 - DNA, 50 bp, synthetic construct
  source 1..50: mol_type = other DNA
gtactggctgatgataaacgccgccaccgggccttgtcctcccattgcca

SEQ ID NO: 64920 - DNA, 50 bp, synthetic construct
  source 1..50: mol_type = other DNA
catacgtcaggaagaacatccacgtccgtggatttttggccggacgttcc

SEQ ID NO: 64921 - DNA, 50 bp, synthetic construct
  source 1..50: mol_type = other DNA
aaagcatttgaatccatatcgtcctccaacaatgctcgttcttgtgcttt

SEQ ID NO: 64922 - DNA, 50 bp, synthetic construct
  source 1..50: mol_type = other DNA
cgcataaactctgattcatctattataaagggaaaatcagagtataagca

SEQ ID NO: 64923 - DNA, 50 bp, synthetic construct
  source 1..50: mol_type = other DNA
atacaacaaaaaaagaggggcaatcgattgcccctctttttgttgtcaat

SEQ ID NO: 64924 - DNA, 50 bp, synthetic construct
  source 1..50: mol_type = other DNA
caatgtaggtgatgatctgtatgtatcccaaaagggcaagaccgacaaaa

SEQ ID NO: 64925 - DNA, 50 bp, synthetic construct
  source 1..50: mol_type = other DNA
tataaaaaactggaaactcttgccagtggcagaatttggagattcagata

SEQ ID NO: 64926 - DNA, 50 bp, synthetic construct
  source 1..50: mol_type = other DNA
ccccgctgtcatgaagtccgaacagccggggtgactgcacttggtacggc

SEQ ID NO: 64927 - DNA, 50 bp, synthetic construct
  source 1..50: mol_type = other DNA
atggggcaaatgggaaagaataaaattttaagatcacgcacaaaatagtc

SEQ ID NO: 64928 - DNA, 50 bp, synthetic construct
  source 1..50: mol_type = other DNA
acttgtacgcagtatcatcaaatttcaaactccccgccgctttgaaaaaa

SEQ ID NO: 64929 - DNA, 50 bp, synthetic construct
  source 1..50: mol_type = other DNA
tatgctatggatgaagtatgcaacaagtggcaaggtgacataatagcaac

SEQ ID NO: 64930 - DNA, 50 bp, synthetic construct
  source 1..50: mol_type = other DNA
gcggcacagaaatcgaggcgtgagtcttcataccccgatcgataagcagc

SEQ ID NO: 64931 - DNA, 50 bp, synthetic construct
  source 1..50: mol_type = other DNA
atacggactcccggacattttgcctgctcaaattttccactcttaaaatc

SEQ ID NO: 64932 - DNA, 50 bp, synthetic construct
  source 1..50: mol_type = other DNA
caggtgcgctaccaactgcgctatgcacagagatattggcagacgagctg

SEQ ID NO: 64933 - DNA, 50 bp, synthetic construct
  source 1..50: mol_type = other DNA
gttcatttcgtggatgaaaaggcagagcttggagattcagataagggaag

SEQ ID NO: 64934 - DNA, 50 bp, synthetic construct
  source 1..50: mol_type = other DNA
tttaatgaaaaattatccaaaagatttattttttatacctatttttctaa

SEQ ID NO: 64935 - DNA, 50 bp, synthetic construct
  source 1..50: mol_type = other DNA
gatggagaagcagaaaaagaaacacctgtatctgtatctgagactgtatc

SEQ ID NO: 64936 - DNA, 50 bp, synthetic construct
  source 1..50: mol_type = other DNA
cgtaacgcaaatgtcgacaactcccatggacggacgcatttttaccacgc

SEQ ID NO: 64937 - DNA, 50 bp, synthetic construct
  source 1..50: mol_type = other DNA
gtaaaagaaaagcgctcatgccgaagtcggactgaccgaagcggacgtca

SEQ ID NO: 64938 - DNA, 50 bp, synthetic construct
  source 1..50: mol_type = other DNA
gattgctccatggagtccggataccggggcagaaaccatttggaagcgta

SEQ ID NO: 64939 - DNA, 50 bp, synthetic construct
  source 1..50: mol_type = other DNA
attttgcatggcatacaccatgaagccggctgatgagtgcaatagaaaat

SEQ ID NO: 64940 - DNA, 50 bp, synthetic construct
  source 1..50: mol_type = other DNA
tatccgtcattgccgtcaacctcctgcactgttgtaggaaatcccgaggg

SEQ ID NO: 64941 - DNA, 50 bp, synthetic construct
  source 1..50: mol_type = other DNA
tttttgactgttttatttgccatgatttttgaaaattcggggcagaaaaa

SEQ ID NO: 64942 - DNA, 50 bp, synthetic construct
  source 1..50: mol_type = other DNA
gaacgaaaacaggaaggtatttttcgtattcgtccttgctgccctctttc

SEQ ID NO: 64943 - DNA, 50 bp, synthetic construct
  source 1..50: mol_type = other DNA
ttccgttccagccaggtttattcccgggaatctttctttcgtcaatccat

SEQ ID NO: 64944 - DNA, 50 bp, synthetic construct
  source 1..50: mol_type = other DNA
aaagataccagaagaacgccggaatattctaccatttatctgtaccactg

SEQ ID NO: 64945 - DNA, 50 bp, synthetic construct
  source 1..50: mol_type = other DNA
tcggcccgttcgtcctgaactacgtcggacgttcctatggaatatcccga

SEQ ID NO: 64946 - DNA, 50 bp, synthetic construct
  source 1..50: mol_type = other DNA
gtttttgcttttgtttttctcgccattcatagaaaagtatagaaaaaacc

SEQ ID NO: 64947 - DNA, 50 bp, synthetic construct
  source 1..50: mol_type = other DNA
caataaatcaaaggcttcagcaattttgacattaaagctaagatttcctg

SEQ ID NO: 64948 - DNA, 50 bp, synthetic construct
  source 1..50: mol_type = other DNA
ggaaatataggcgacctgagcaaaatatatgccatattgcctatatgtcc

SEQ ID NO: 64949 - DNA, 50 bp, synthetic construct
  source 1..50: mol_type = other DNA
gacacaggagctggaacgcaagctgcaatatgcgtttatgctcggatttc

SEQ ID NO: 64950 - DNA, 50 bp, synthetic construct
  source 1..50: mol_type = other DNA
cattttcggataataatgtacccaaaataagtgattaacattcgaaaatt

SEQ ID NO: 64951 - DNA, 50 bp, synthetic construct
  source 1..50: mol_type = other DNA
ttgcttttcccatatagataaaattaggtttgaaccgtatatacaagcaa

SEQ ID NO: 64952 - DNA, 50 bp, synthetic construct
  source 1..50: mol_type = other DNA
catatgtcattataataacgtaatcgacatcgggctgacaatagctgatg

SEQ ID NO: 64953 - DNA, 50 bp, synthetic construct
  source 1..50: mol_type = other DNA
cacattcctctaccactgaaaaaagcttttctgctattatcaatcttgtt

SEQ ID NO: 64954 - DNA, 50 bp, synthetic construct
  source 1..50: mol_type = other DNA
ctgctgttgctgttcgttttctgattaagactaacgatgagaaaaggagt

SEQ ID NO: 64955 - DNA, 50 bp, synthetic construct
  source 1..50: mol_type = other DNA
tgttatttttactcattgcaatccgaggatgcatgtgatgaataataccg

SEQ ID NO: 64956 - DNA, 50 bp, synthetic construct
  source 1..50: mol_type = other DNA
caaagccaaaatcgcgcaggcagaagccgcgctgcccctgctccgccccg

SEQ ID NO: 64957 - DNA, 50 bp, synthetic construct
  source 1..50: mol_type = other DNA
aacttccagctctctgctctggaaaaggacactcaaggtatggcaaaaag

SEQ ID NO: 64958 - DNA, 50 bp, synthetic construct
  source 1..50: mol_type = other DNA
cttttccagaattatcttgcaggtatcagtgcaatctgattcagcgaaat

SEQ ID NO: 64959 - DNA, 50 bp, synthetic construct
  source 1..50: mol_type = other DNA
tcattgccgataaaaaacaaaaaaatttgatttgattttatttgcataat

SEQ ID NO: 64960 - DNA, 50 bp, synthetic construct
  source 1..50: mol_type = other DNA
gcagtaaattgcaaaataaactactagtagttttttgcattaaaaattga

SEQ ID NO: 64961 - DNA, 50 bp, synthetic construct
  source 1..50: mol_type = other DNA
gcgtgaccggaatggctaaaaccgttcggtcggcgacaccctgctctgcg

SEQ ID NO: 64962 - DNA, 50 bp, synthetic construct
  source 1..50: mol_type = other DNA
agaaggtaacgaattctctccgtccggaatggctaaaaccgttaccgtaa

SEQ ID NO: 64963 - DNA, 50 bp, synthetic construct
  source 1..50: mol_type = other DNA
gataaagattataccatatgaaattgaattcaagacggtgaaaataaatc

SEQ ID NO: 64964 - DNA, 50 bp, synthetic construct
  source 1..50: mol_type = other DNA
ccaaaaaatcgttctcaaaatcctttcggactttcagagcgaatatatgg

SEQ ID NO: 64965 - DNA, 50 bp, synthetic construct
  source 1..50: mol_type = other DNA
cacccgcagattcggtttcttcgtcacatgagaatccgcgtcagcaaata

SEQ ID NO: 64966 - DNA, 50 bp, synthetic construct
  source 1..50: mol_type = other DNA
taaaattgcatggaaaatttgatgtgcaaaatccaagggcaatggtttgt

SEQ ID NO: 64967 - DNA, 50 bp, synthetic construct
  source 1..50: mol_type = other DNA
ggcaaatcccagtcactaatcactccagtaccgggctgcggttataatcc

SEQ ID NO: 64968 - DNA, 50 bp, synthetic construct
  source 1..50: mol_type = other DNA
tattcttcaccttcttcgtaataatattatagcaaagaaggctagaaaaa

SEQ ID NO: 64969 - DNA, 50 bp, synthetic construct
  source 1..50: mol_type = other DNA
aagaccgcgcatctggaagtccatgcaacggcttgcagcgcaagctcctt

SEQ ID NO: 64970 - DNA, 50 bp, synthetic construct
  source 1..50: mol_type = other DNA
catatgtatctaataaatcaaaaaatttttgtgtttccgaactacacctt

SEQ ID NO: 64971 - DNA, 50 bp, synthetic construct
  source 1..50: mol_type = other DNA
tttattgtttctcctaattttaagttatatgttcacattcctacgattcg

SEQ ID NO: 64972 - DNA, 50 bp, synthetic construct
  source 1..50: mol_type = other DNA
catgcttgacctccttgttgaatgtgggcatgaccattgtgctggccgaa

SEQ ID NO: 64973 - DNA, 50 bp, synthetic construct
  source 1..50: mol_type = other DNA
tctctccgggtgcatcgcccggtctgagccgcacggtccaccgtgagaga

SEQ ID NO: 64974 - DNA, 50 bp, synthetic construct
  source 1..50: mol_type = other DNA
cgatcccggccatcatcgatgcagacccacactgttgatggcccatgttt

SEQ ID NO: 64975 - DNA, 50 bp, synthetic construct
  source 1..50: mol_type = other DNA
gcgtcttgtagcttgccagtttctttatcccttggtaaagtacagtttac

SEQ ID NO: 64976 - DNA, 50 bp, synthetic construct
  source 1..50: mol_type = other DNA
cacatattccagcccttctacactgcaagtccaaagcaagaacttatgca

SEQ ID NO: 64977 - DNA, 50 bp, synthetic construct
  source 1..50: mol_type = other DNA
aatgacttttttatagcttgctctctgatttaagataaaaatctcgtatc

SEQ ID NO: 64978 - DNA, 50 bp, synthetic construct
  source 1..50: mol_type = other DNA
aaaaaattatggaagttactaattgattggagttaaggttattggatttt

SEQ ID NO: 64979 - DNA, 50 bp, synthetic construct
  source 1..50: mol_type = other DNA
tgcaaaaagcagcctccctcgcgggctcatcacactcgctgcattcctct

SEQ ID NO: 64980 - DNA, 50 bp, synthetic construct
  source 1..50: mol_type = other DNA
cggaattcacagcaacggttattctcagagaaaggatgataagaatggca

SEQ ID NO: 64981 - DNA, 50 bp, synthetic construct
  source 1..50: mol_type = other DNA
ccttgcgaaaaaacgggggctttgtaacaactccgtcaccgtccgcatct

SEQ ID NO: 64982 - DNA, 50 bp, synthetic construct
  source 1..50: mol_type = other DNA
tgcattggctgcaacctgcacaaaactctatgcaaagagcagttatctac

SEQ ID NO: 64983 - DNA, 50 bp, synthetic construct
  source 1..50: mol_type = other DNA
ccatcaatagacgatgcagacacagctggagatgctgcgtcagccgctgg

SEQ ID NO: 64984 - DNA, 50 bp, synthetic construct
  source 1..50: mol_type = other DNA
cgcaaccataaacccgctgacgcatccgtttcaggtgtattccggggctg

SEQ ID NO: 64985 - DNA, 50 bp, synthetic construct
  source 1..50: mol_type = other DNA
gcagcatttctgttacctcctttttggaaaggaggaaccagaatgcctaa

SEQ ID NO: 64986 - DNA, 50 bp, synthetic construct
  source 1..50: mol_type = other DNA
agaccgcttcccgctgcttgtcgttcaacacaaagagcggcgtgcaaaac

SEQ ID NO: 64987 - DNA, 50 bp, synthetic construct
  source 1..50: mol_type = other DNA
gacgtggatgcgtagcggcacagaagaatcctttgctgcgcccacacctc

SEQ ID NO: 64988 - DNA, 50 bp, synthetic construct
  source 1..50: mol_type = other DNA
agctttctgctctggagcggtctgtccacgccgttctgcatcaggaagcc

SEQ ID NO: 64989 - DNA, 50 bp, synthetic construct
  source 1..50: mol_type = other DNA
tgtaccggcggtcggtaatataaaaatgactgtgaccgaccgcgctgctg

SEQ ID NO: 64990 - DNA, 50 bp, synthetic construct
  source 1..50: mol_type = other DNA
gttggcatccctaccaatgtatcccagccaccatttcaaggtgtgccaat

SEQ ID NO: 64991 - DNA, 50 bp, synthetic construct
  source 1..50: mol_type = other DNA
cgtgtggtaatgccaccgccttttccaaaaatcgtgtgtattatgctggc

SEQ ID NO: 64992 - DNA, 50 bp, synthetic construct
  source 1..50: mol_type = other DNA
taccgacgccggggatttcttactatcgttagaagggggtggcgctgttg

SEQ ID NO: 64993 - DNA, 50 bp, synthetic construct
  source 1..50: mol_type = other DNA
gggagaacaactcctttaccaaagagttttggtagcgcgcttgaatgggg

SEQ ID NO: 64994 - DNA, 50 bp, synthetic construct
  source 1..50: mol_type = other DNA
ttgtaaaggatcttccttgtgacgactgtttccaagtcctgcttttttgt

SEQ ID NO: 64995 - DNA, 50 bp, synthetic construct
  source 1..50: mol_type = other DNA
catgcaaaggaaggcgaaattgcataagcaaaaggaggtctttttttatg

SEQ ID NO: 64996 - DNA, 50 bp, synthetic construct
  source 1..50: mol_type = other DNA
ctgcctgttcaaatggatctgcaaatttatagtgaaatttatgcatgccc

SEQ ID NO: 64997 - DNA, 50 bp, synthetic construct
  source 1..50: mol_type = other DNA
ccgaacaactgaactcttcaattttcaaatcgaagtcaacggtgtttttg

SEQ ID NO: 64998 - DNA, 50 bp, synthetic construct
  source 1..50: mol_type = other DNA
tatcgctttgaaaggcaacagcacgggtgtgttttcctttttttgcttgt

SEQ ID NO: 64999 - DNA, 50 bp, synthetic construct
  source 1..50: mol_type = other DNA
gttctggcgtgaaggaaaaccagagcgcagttttggtagcgcgcttgaat

SEQ ID NO: 65000 - DNA, 50 bp, synthetic construct
  source 1..50: mol_type = other DNA
caattgcaggtcaaaaggactataaatataattcttctgttctctttcta

SEQ ID NO: 65001 - DNA, 50 bp, synthetic construct
  source 1..50: mol_type = other DNA
ttctggatgttatttccggtcctttgcaggaaaatattatggatttgttt

SEQ ID NO: 65002 - DNA, 50 bp, synthetic construct
  source 1..50: mol_type = other DNA
cctcgaagcaagtagcgccatacctccgcatggattatctgctaaaagaa

SEQ ID NO: 65003 - DNA, 50 bp, synthetic construct
  source 1..50: mol_type = other DNA
accttggaaagctccgtgagcgctaaacccggcagtaagcggcgatgcgt

SEQ ID NO: 65004 - DNA, 50 bp, synthetic construct
  source 1..50: mol_type = other DNA
aaagcggatcttcatctgctttcagcagacagcgtaggcttagttgcctc

SEQ ID NO: 65005 - DNA, 50 bp, synthetic construct
  source 1..50: mol_type = other DNA
aaaaaacccacttttcgcgcaaagcgcttcggcgtcatgctgttgttttt

SEQ ID NO: 65006 - DNA, 50 bp, synthetic construct
  source 1..50: mol_type = other DNA
gccatttcttttcgctccttattttcaaatactgagaccggcgaaaaaat

SEQ ID NO: 65007 - DNA, 50 bp, synthetic construct
  source 1..50: mol_type = other DNA
gatttgaattccttcacgatctccgacacgagcgtaggccgccacacgtc

SEQ ID NO: 65008 - DNA, 50 bp, synthetic construct
  source 1..50: mol_type = other DNA
atggaaagcctccttgtactttgatgcaaaggcaaggggcttgcggaagt

SEQ ID NO: 65009 - DNA, 50 bp, synthetic construct
  source 1..50: mol_type = other DNA
cctttctatttttctaaaaaagggtattattttatggaaaaagcaaaaga

SEQ ID NO: 65010 - DNA, 50 bp, synthetic construct
  source 1..50: mol_type = other DNA
taacgtaatcgactatcctgccctgctgtatgattatcccggcgacccac

SEQ ID NO: 65011 - DNA, 50 bp, synthetic construct
  source 1..50: mol_type = other DNA
gctaaattatgtaaatagtatatcatggtaaattaaagacataaattata

SEQ ID NO: 65012 - DNA, 50 bp, synthetic construct
  source 1..50: mol_type = other DNA
aaagaaaaagcgccgcaccgccgcctacagcttttcggcgcgctttcttt

SEQ ID NO: 65013 - DNA, 50 bp, synthetic construct
  source 1..50: mol_type = other DNA
gtgtcgaatgtgccgcatattccgggaggaatatcaggcgtattttgcag

SEQ ID NO: 65014 - DNA, 50 bp, synthetic construct
  source 1..50: mol_type = other DNA
aggcgtccagctttctgctctggagctgaatccgaggattctgcgcggcg

SEQ ID NO: 65015 - DNA, 50 bp, synthetic construct
  source 1..50: mol_type = other DNA
caccgccgctgacaagcagcagggcagcggattgatggtcggcggaatga

SEQ ID NO: 65016 - DNA, 50 bp, synthetic construct
  source 1..50: mol_type = other DNA
ctgcggagcgaatatgaacctttccggattgcgtaatatatgcgattttt

SEQ ID NO: 65017 - DNA, 50 bp, synthetic construct
  source 1..50: mol_type = other DNA
taatattattgcaatcaagactattaccagagattgacggtattatatat

SEQ ID NO: 65018 - DNA, 50 bp, synthetic construct
  source 1..50: mol_type = other DNA
ccacgtattatcgatcagccgacctgtttattctgccatattgtacgttt

SEQ ID NO: 65019 - DNA, 50 bp, synthetic construct
  source 1..50: mol_type = other DNA
gagatatcataactgttcatattgcataatctgaacaattatccgccgtc

SEQ ID NO: 65020 - DNA, 50 bp, synthetic construct
  source 1..50: mol_type = other DNA
tttatactactaaattaaagctaccggacggtgtaagttagtagtataaa

SEQ ID NO: 65021 - DNA, 50 bp, synthetic construct
  source 1..50: mol_type = other DNA
ttcatatgaggatgtctgtctcggatatcgtgaaggcataggaatatggc

SEQ ID NO: 65022 - DNA, 50 bp, synthetic construct
  source 1..50: mol_type = other DNA
atacatcataaatatgagttttacgatcaaaaaagatatttatattcaga

SEQ ID NO: 65023 - DNA, 50 bp, synthetic construct
  source 1..50: mol_type = other DNA
cccccgtttctatagataatcatatgtttgattatcaggataacagggtt

SEQ ID NO: 65024 - DNA, 50 bp, synthetic construct
  source 1..50: mol_type = other DNA
tgcgtgacaagctccccaccattgttcaaaactgtggagctggtcttcct

SEQ ID NO: 65025 - DNA, 50 bp, synthetic construct
  source 1..50: mol_type = other DNA
agcgagaagatctccgcgattgggaaagcaagtccgccccgctgctcgac

SEQ ID NO: 65026 - DNA, 50 bp, synthetic construct
  source 1..50: mol_type = other DNA
atggttttgaaataaaagaagataaagtttgaaagttacgggaatatagc

SEQ ID NO: 65027 - DNA, 50 bp, synthetic construct
  source 1..50: mol_type = other DNA
aaaacttcatatttctatctaacaaatcgcagaaacaaaatggagaatga

SEQ ID NO: 65028 - DNA, 50 bp, synthetic construct
  source 1..50: mol_type = other DNA
ctatatatgtactctgcctgtctgataagatacacattttacgcagatta

SEQ ID NO: 65029 - DNA, 50 bp, synthetic construct
  source 1..50: mol_type = other DNA
tttgtcccagccggaaacggacgagcctttccgtcaacgattatatatcc

SEQ ID NO: 65030 - DNA, 50 bp, synthetic construct
  source 1..50: mol_type = other DNA
gtatgaattctgaacgctttcgctgctttgcaaaaatccagtatcaatac

SEQ ID NO: 65031 - DNA, 50 bp, synthetic construct
  source 1..50: mol_type = other DNA
aaaatgtgatattattgtagtctgaaaagaaaacataaataatgaatata

SEQ ID NO: 65032 - DNA, 50 bp, synthetic construct
  source 1..50: mol_type = other DNA
gaaaatggtgaaaaatcgaaatatacatattatcagaattgacggaaaaa

SEQ ID NO: 65033 - DNA, 50 bp, synthetic construct
  source 1..50: mol_type = other DNA
catcaattcccacttgactgcctgatcggttaatcaattcggaagatact

SEQ ID NO: 65034 - DNA, 50 bp, synthetic construct
  source 1..50: mol_type = other DNA
aagacagaatcatcatacactatccaaagggtgtgtgacccatctaattc

SEQ ID NO: 65035 - DNA, 50 bp, synthetic construct
  source 1..50: mol_type = other DNA
cgttggcaacggcgcacctcttgaattcaccgacgcggacggtatgcccg

SEQ ID NO: 65036 - DNA, 50 bp, synthetic construct
  source 1..50: mol_type = other DNA
cgtaaggcagctcagggacaagaatattttctacccgtttttgcacggaa

SEQ ID NO: 65037 - DNA, 50 bp, synthetic construct
  source 1..50: mol_type = other DNA
tgttgaggaaaaagaaaaggccccggtggcgtttttctgttcgtatcaga

SEQ ID NO: 65038 - DNA, 50 bp, synthetic construct
  source 1..50: mol_type = other DNA
gaattgctccaagttttctcggctgcaggcgttgaaacctgcggtctttt

SEQ ID NO: 65039 - DNA, 50 bp, synthetic construct
  source 1..50: mol_type = other DNA
gacatattacctctaaaaacacgatatagtgttttttgttcggactgtcg

SEQ ID NO: 65040 - DNA, 50 bp, synthetic construct
  source 1..50: mol_type = other DNA
cagtatcatatcagcttcaacatgctcctattgacaaaaagatgagtttt

SEQ ID NO: 65041 - DNA, 50 bp, synthetic construct
  source 1..50: mol_type = other DNA
gttcgcaatgtctatttgaattacctgtaaaggtagttgaccttgcaaac

SEQ ID NO: 65042 - DNA, 50 bp, synthetic construct
  source 1..50: mol_type = other DNA
caacaattctatcgtctcacataattaggcttggcagcataactgaaaat

SEQ ID NO: 65043 - DNA, 50 bp, synthetic construct
  source 1..50: mol_type = other DNA
actgtattgctactcacaacaaactttgcagttagatatagcaagaagga

SEQ ID NO: 65044 - DNA, 50 bp, synthetic construct
  source 1..50: mol_type = other DNA
ttccagaaaaagagtttttaatattacgatcaaaaataatcaaaaaggaa

SEQ ID NO: 65045 - DNA, 50 bp, synthetic construct
  source 1..50: mol_type = other DNA
cggatttatcggaaacgctgtaaaatttttcttacgctcttccatttgac

SEQ ID NO: 65046 - DNA, 50 bp, synthetic construct
  source 1..50: mol_type = other DNA
gcgctgagcaggatcatggtacaatggccggagatgccccgcatcagact

SEQ ID NO: 65047 - DNA, 50 bp, synthetic construct
  source 1..50: mol_type = other DNA
ctcatgctttttctcctttcttcccataaagaaaggagaaatatgactac

SEQ ID NO: 65048 - DNA, 50 bp, synthetic construct
  source 1..50: mol_type = other DNA
tttatgtattaggtgtagacttctttactatgcttcacctgttaatttta

SEQ ID NO: 65049 - DNA, 50 bp, synthetic construct
  source 1..50: mol_type = other DNA
aataactcaaagtgttgtgaaaatatttttaattgttactgcgtccattt

SEQ ID NO: 65050 - DNA, 50 bp, synthetic construct
  source 1..50: mol_type = other DNA
acgcgctggccgccgccggatttgcatcaaaacggcggcgggcagattga

SEQ ID NO: 65051 - DNA, 50 bp, synthetic construct
  source 1..50: mol_type = other DNA
tttcttcttatgataatgcgaccttaaggataacggaaaagaagaaaagc

SEQ ID NO: 65052 - DNA, 50 bp, synthetic construct
  source 1..50: mol_type = other DNA
aaacccagaagcctcatagctcctggatctgctatgagttcggatgataa

SEQ ID NO: 65053 - DNA, 50 bp, synthetic construct
  source 1..50: mol_type = other DNA
tatataccatcgaattgttctgttttttctttgccattcgcatgtacccg

SEQ ID NO: 65054 - DNA, 50 bp, synthetic construct
  source 1..50: mol_type = other DNA
cgtggcggcgtatctgcggcaaaacggtcttggtaaaacaagccgccaca

SEQ ID NO: 65055 - DNA, 50 bp, synthetic construct
  source 1..50: mol_type = other DNA
agagaaaggctggtggaaccatgagaaactggtgttagtgcgctggttca

SEQ ID NO: 65056 - DNA, 50 bp, synthetic construct
  source 1..50: mol_type = other DNA
tcattgtagcaggagcgcgggcggcctcgaccgcctcggcgagacaccgc

SEQ ID NO: 65057 - DNA, 50 bp, synthetic construct
  source 1..50: mol_type = other DNA
gccagctttcagcaatttttaatttcaattatcaacccccgaacaaccaa

SEQ ID NO: 65058 - DNA, 50 bp, synthetic construct
  source 1..50: mol_type = other DNA
tcactcccggacagtttcatttacatgatgaggatactgtaccggagtgc

SEQ ID NO: 65059 - DNA, 50 bp, synthetic construct
  source 1..50: mol_type = other DNA
ccgtagcagcatcaatagtatacttaaccaagtaataggctgatttacgg

SEQ ID NO: 65060 - DNA, 50 bp, synthetic construct
  source 1..50: mol_type = other DNA
ataaggcaacagaaaagccctcccatggggaaggctctttttgtgtttat

SEQ ID NO: 65061 - DNA, 50 bp, synthetic construct
  source 1..50: mol_type = other DNA
tgtcgtactaactctgcattgcctgtacttgtcgtcgccgtagtacagat

SEQ ID NO: 65062 - DNA, 50 bp, synthetic construct
  source 1..50: mol_type = other DNA
ttacaaattctttcccttcgtcggtatcatcatagacgaaaacggcgtga

SEQ ID NO: 65063 - DNA, 50 bp, synthetic construct
  source 1..50: mol_type = other DNA
caaacaaaaatgattgcaatatcgaaggtaggggcaaaaaattatgggta

SEQ ID NO: 65064 - DNA, 50 bp, synthetic construct
  source 1..50: mol_type = other DNA
cattccctttcttggtttcaagttggaacggaaaggaggcaaagtgatgg

SEQ ID NO: 65065 - DNA, 50 bp, synthetic construct
  source 1..50: mol_type = other DNA
atgcgaaatttattgaaacagtagaaaagcatcttgcatatttttctcat

SEQ ID NO: 65066 - DNA, 50 bp, synthetic construct
  source 1..50: mol_type = other DNA
tcactctaaagactctcattatcaagcctgaatgattcgttatatattcc

SEQ ID NO: 65067 - DNA, 50 bp, synthetic construct
  source 1..50: mol_type = other DNA
atcagaaacagattacagatacagtctgccagccagaaaataaatgtgat

SEQ ID NO: 65068 - DNA, 50 bp, synthetic construct
  source 1..50: mol_type = other DNA
agggcattatttttgatttagggcatacatacagtaaaaaagacgcccgg

SEQ ID NO: 65069 - DNA, 50 bp, synthetic construct
  source 1..50: mol_type = other DNA
ctgaacgtctaacccaagcccatttcatgtaccttcggtctgccgtcaac

SEQ ID NO: 65070 - DNA, 50 bp, synthetic construct
  source 1..50: mol_type = other DNA
tgcttccaggcattgaccatttttcaaacccttgtcaatatgttgaaatg

SEQ ID NO: 65071 - DNA, 50 bp, synthetic construct
  source 1..50: mol_type = other DNA
tgtggttttctcgctgtcgttcattggaaaaggataagacgaaaacccaa

SEQ ID NO: 65072 - DNA, 50 bp, synthetic construct
  source 1..50: mol_type = other DNA
aggcgattgcagacatgggtttgcaaatcaagtcccgtctgcaaccaagg

SEQ ID NO: 65073 - DNA, 50 bp, synthetic construct
  source 1..50: mol_type = other DNA
aaaggcgattgcagacatgggtttgcaatgtactatatggcatccgcagg

SEQ ID NO: 65074 - DNA, 50 bp, synthetic construct
  source 1..50: mol_type = other DNA
ttgctgtaagcatattctgcttgcttgcaaccagaatatgctctgataaa

SEQ ID NO: 65075 - DNA, 50 bp, synthetic construct
  source 1..50: mol_type = other DNA
atgctgagacgaagccagaaaagaaatcttttctgctgctggctcatcaa

SEQ ID NO: 65076 - DNA, 50 bp, synthetic construct
  source 1..50: mol_type = other DNA
tcaagataagagccctttttgttgcaaggccccgcggattcatagattga

SEQ ID NO: 65077 - DNA, 50 bp, synthetic construct
  source 1..50: mol_type = other DNA
ccacatacaaaccggatgaaattgaaaataataatgccattttctttgta

SEQ ID NO: 65078 - DNA, 50 bp, synthetic construct
  source 1..50: mol_type = other DNA
gacgagaaatagtatatcatccggtcatagatgatattcagccgttccag

SEQ ID NO: 65079 - DNA, 50 bp, synthetic construct
  source 1..50: mol_type = other DNA
gtagttttgcagtacatgtgcagacaaacacttttggtatggacaaaaac

SEQ ID NO: 65080 - DNA, 50 bp, synthetic construct
  source 1..50: mol_type = other DNA
ccgtaaatcagcctattacttggttaagtatactattgatgctgctacgg

SEQ ID NO: 65081 - DNA, 50 bp, synthetic construct
  source 1..50: mol_type = other DNA
atcgtctcagatttatcccaacgatataattatattaaattagtgaatac

SEQ ID NO: 65082 - DNA, 50 bp, synthetic construct
  source 1..50: mol_type = other DNA
taatcaattatagctttataaaaaatttcgggaacaggtggaatggattg

SEQ ID NO: 65083 - DNA, 50 bp, synthetic construct
  source 1..50: mol_type = other DNA
tagattttatgaaaatattagcaaactatgcaatagcataatagatgtaa

SEQ ID NO: 65084 - DNA, 50 bp, synthetic construct
  source 1..50: mol_type = other DNA
cagtcattccaccgaccatcaatccgcttggataggcggtggcagatatg

SEQ ID NO: 65085 - DNA, 50 bp, synthetic construct
  source 1..50: mol_type = other DNA
cacgcctttagaataagcggcaagcgctgctgcccggcgctggagatcat

SEQ ID NO: 65086 - DNA, 50 bp, synthetic construct
  source 1..50: mol_type = other DNA
aaggaaaatgctgtcccgtttcaggcttatctttggacagtatttaccgc

SEQ ID NO: 65087 - DNA, 50 bp, synthetic construct
  source 1..50: mol_type = other DNA
ctgactcctttcccgtgttttctctcacccaaacagaggaaaacagcggt

SEQ ID NO: 65088 - DNA, 50 bp, synthetic construct
  source 1..50: mol_type = other DNA
tagcaagtccatatcatgacgaattttagccaaaacatttgcgctaattc

SEQ ID NO: 65089 - DNA, 50 bp, synthetic construct
  source 1..50: mol_type = other DNA
gcgtccttcatctgctgctgccgcgcctaccagcagcacgccgtgtacgc

SEQ ID NO: 65090 - DNA, 50 bp, synthetic construct
  source 1..50: mol_type = other DNA
taataaaatcctccttaaattgaaatctcacttgacgagtctaagtctta

SEQ ID NO: 65091 - DNA, 50 bp, synthetic construct
  source 1..50: mol_type = other DNA
gaaaaaatgcaattaattgcacaaatttttacccttaccttcctttatgt

SEQ ID NO: 65092 - DNA, 50 bp, synthetic construct
  source 1..50: mol_type = other DNA
ttttaccttgtaatattttttataaaaatagaaaaaggagcaatctaaat

SEQ ID NO: 65093 - DNA, 50 bp, synthetic construct
  source 1..50: mol_type = other DNA
gttacgccgcctttaaatttcgtcaaaaaaaaatttcaaacaggaaaaaa

SEQ ID NO: 65094 - DNA, 50 bp, synthetic construct
  source 1..50: mol_type = other DNA
aatgagcgaagccagagcattaggcttctggctttcggataattcgatct

SEQ ID NO: 65095 - DNA, 50 bp, synthetic construct
  source 1..50: mol_type = other DNA
tctccgtcagcttccggctccagatctctggaggagcagcgggaggcagc

SEQ ID NO: 65096 - DNA, 50 bp, synthetic construct
  source 1..50: mol_type = other DNA
actatctggcggcgctggagagcgcccgatttccgccgcgtagagagctt

SEQ ID NO: 65097 - DNA, 50 bp, synthetic construct
  source 1..50: mol_type = other DNA
taaaaacgcttgatatcgatttaattcgtcatatttttcaagccgttttg

SEQ ID NO: 65098 - DNA, 50 bp, synthetic construct
  source 1..50: mol_type = other DNA
gaaaaatctgcccacggaaaaagtttatatagtccgtaaaaatgcttttt

SEQ ID NO: 65099 - DNA, 50 bp, synthetic construct
  source 1..50: mol_type = other DNA
gatataaggctttcctaacctgtcaaaacaggccgggaaagcccggtttg

SEQ ID NO: 65100 - DNA, 50 bp, synthetic construct
  source 1..50: mol_type = other DNA
attgaagccaccgccataggacatcaggagctaggtgttagtgcttcata

SEQ ID NO: 65101 - DNA, 50 bp, synthetic construct
  source 1..50: mol_type = other DNA
ctttaacttttctccgaactgttttctaattgcgttttgaaaatgtattc

SEQ ID NO: 65102 - DNA, 50 bp, synthetic construct
  source 1..50: mol_type = other DNA
tttttgttagtcgtatattaactctatccgtgatatgctttctgaaaatc

SEQ ID NO: 65103 - DNA, 50 bp, synthetic construct
  source 1..50: mol_type = other DNA
gaacacgagcgttaccacccggagctccggccctgaaggtagccgtgggc

SEQ ID NO: 65104 - DNA, 50 bp, synthetic construct
  source 1..50: mol_type = other DNA
gatcccccgtcaggtcgatgaacacctgtataccgacctaacggtgggca

SEQ ID NO: 65105 - DNA, 50 bp, synthetic construct
  source 1..50: mol_type = other DNA
tttcttcttttaattctaccaaaaattgatgaaagaattaaaacaatggc

SEQ ID NO: 65106 - DNA, 50 bp, synthetic construct
  source 1..50: mol_type = other DNA
aattcaggtgtcttaagtctgatttatatctaccagccgaccgttgacgc

SEQ ID NO: 65107 - DNA, 50 bp, synthetic construct
  source 1..50: mol_type = other DNA
gcactcatgaagaagatacggtacataccggccctttttttcatggaaag

SEQ ID NO: 65108 - DNA, 50 bp, synthetic construct
  source 1..50: mol_type = other DNA
cctcatctttttgtcatgagcggtgatccactattgacaaaaagatgagc

SEQ ID NO: 65109 - DNA, 50 bp, synthetic construct
  source 1..50: mol_type = other DNA
gctcagaggcacggcggcaaactgcaacctttaaacctgtatctccgtcc

SEQ ID NO: 65110 - DNA, 50 bp, synthetic construct
  source 1..50: mol_type = other DNA
caagaaatccgactattataaaggcgccgggatcgccgttacttttctct

SEQ ID NO: 65111 - DNA, 50 bp, synthetic construct
  source 1..50: mol_type = other DNA
ttggccatttccggctttccggcattgtccgaaactgaacaaaaggcttt

SEQ ID NO: 65112 - DNA, 50 bp, synthetic construct
  source 1..50: mol_type = other DNA
ctaccgcaccgagcattaccgtagaactatggtaatgcgtagtgtatcaa

SEQ ID NO: 65113 - DNA, 50 bp, synthetic construct
  source 1..50: mol_type = other DNA
ttcttgagtaacgcataaaaaaggagtttattttatgcgctgctcaaaac

SEQ ID NO: 65114 - DNA, 50 bp, synthetic construct
  source 1..50: mol_type = other DNA
gcttggtattttagtgtaggttaaatatatagactacccaaagagaaagg

SEQ ID NO: 65115 - DNA, 50 bp, synthetic construct
  source 1..50: mol_type = other DNA
tgcaaaagatatggattgtgcgcgtgatgggacaagggttccggatacca

SEQ ID NO: 65116 - DNA, 50 bp, synthetic construct
  source 1..50: mol_type = other DNA
attttcttctttctcatttctggcccggaagaatggagagagaagaatgt

SEQ ID NO: 65117 - DNA, 50 bp, synthetic construct
  source 1..50: mol_type = other DNA
acaatatatacggatttttatgattttacagcgaaatccgtaaatccgca

SEQ ID NO: 65118 - DNA, 50 bp, synthetic construct
  source 1..50: mol_type = other DNA
gcatataatcccggtgaaacccttgctattgtacagaaggaggaatgctt

SEQ ID NO: 65119 - DNA, 50 bp, synthetic construct
  source 1..50: mol_type = other DNA
ttcgtctgtcatgcaaggtcttcctttgaacggctggcatgaagtgcgct

SEQ ID NO: 65120 - DNA, 50 bp, synthetic construct
  source 1..50: mol_type = other DNA
ttttcagaatagctatgaacaaaacgttttgcgaatagcctgctacaaca

SEQ ID NO: 65121 - DNA, 50 bp, synthetic construct
  source 1..50: mol_type = other DNA
gtctttcggctattctcattgaaaacattctccccgttctgggttgagat

SEQ ID NO: 65122 - DNA, 50 bp, synthetic construct
  source 1..50: mol_type = other DNA
gttttcgtttcaggcagataataaatattttattgccctgaataactaat

SEQ ID NO: 65123 - DNA, 50 bp, synthetic construct
  source 1..50: mol_type = other DNA
gtacagcggtggaagcccgctggaatcgcagcaggctttcgccgcatccg

SEQ ID NO: 65124 - DNA, 50 bp, synthetic construct
  source 1..50: mol_type = other DNA
aaaatggctagttgatgaaaagtctcacgttcctttcttttaaaaatttc

SEQ ID NO: 65125 - DNA, 50 bp, synthetic construct
  source 1..50: mol_type = other DNA
aatattatctttggaggcagaggctaaactcacaacggttagataaaatt

SEQ ID NO: 65126 - DNA, 50 bp, synthetic construct
  source 1..50: mol_type = other DNA
ttcaattattcctctttgggctatgcattttttaattattccccaagacc

SEQ ID NO: 65127 - DNA, 50 bp, synthetic construct
  source 1..50: mol_type = other DNA
atataaactacacgaagatattccaaggaggttcacaagggtgtgcagat

SEQ ID NO: 65128 - DNA, 50 bp, synthetic construct
  source 1..50: mol_type = other DNA
ttttgttgttgctaacgctccaattacatggaacgtttgatacaaaaaat

SEQ ID NO: 65129 - DNA, 50 bp, synthetic construct
  source 1..50: mol_type = other DNA
aaattaaaaagtctgctgtcgggtatacgatgctcccgacttcggctggc

SEQ ID NO: 65130 - DNA, 50 bp, synthetic construct
  source 1..50: mol_type = other DNA
ttttgagttatttcagcttttcataatgccaaagaaaggtgaacgaaaat

SEQ ID NO: 65131 - DNA, 50 bp, synthetic construct
  source 1..50: mol_type = other DNA
ttagttttggcactggatttccgcaggcaaaagctacactgcaaaaaatc

SEQ ID NO: 65132 - DNA, 50 bp, synthetic construct
  source 1..50: mol_type = other DNA
tttgatgggataaagacaagaaattttatgattatatttatctacgcaag

SEQ ID NO: 65133 - DNA, 50 bp, synthetic construct
  source 1..50: mol_type = other DNA
atcgtggttacggatttggccatttctgaggcagaatccttattggaaag

SEQ ID NO: 65134 - DNA, 50 bp, synthetic construct
  source 1..50: mol_type = other DNA
cggaatatcaagcgttttccgataattttcggtggtattgcgaaattccg

SEQ ID NO: 65135 - DNA, 50 bp, synthetic construct
  source 1..50: mol_type = other DNA
ataccgcaaggctcatccaaagtctatgctttggaataggagggccgaca

SEQ ID NO: 65136 - DNA, 50 bp, synthetic construct
  source 1..50: mol_type = other DNA
catctgtgatatcgatctttacaccgttctgggtctcgataaaatagatt

SEQ ID NO: 65137 - DNA, 50 bp, synthetic construct
  source 1..50: mol_type = other DNA
gctttcaccgagattatctatcaggcctcttgcaggccgatgttgcggcc

SEQ ID NO: 65138 - DNA, 50 bp, synthetic construct
  source 1..50: mol_type = other DNA
ggtgcactatttttgtgctcttttgcaaaagaacatttaacttctacccc

SEQ ID NO: 65139 - DNA, 50 bp, synthetic construct
  source 1..50: mol_type = other DNA
aagaaatttctaccacttctttttaataatgttagcttatggttattgta

SEQ ID NO: 65140 - DNA, 50 bp, synthetic construct
  source 1..50: mol_type = other DNA
tcttggataccctttcacctttctttcagccggtaaaaccagatgcagat

SEQ ID NO: 65141 - DNA, 50 bp, synthetic construct
  source 1..50: mol_type = other DNA
caatacttattttaactgcaagaggctacgtgcagctacggaagctataa

SEQ ID NO: 65142 - DNA, 50 bp, synthetic construct
  source 1..50: mol_type = other DNA
ctctctacaaaaatatgatccagtccgcaagggtttatttttttatactc

SEQ ID NO: 65143 - DNA, 50 bp, synthetic construct
  source 1..50: mol_type = other DNA
gtcttacgatgtgaaaaagctccgcaaggaggaattttatcatgtaccag

SEQ ID NO: 65144 - DNA, 50 bp, synthetic construct
  source 1..50: mol_type = other DNA
agggcaggaagggaaagtacgttgcgcagttttggtagcgcgcttgaatg

SEQ ID NO: 65145 - DNA, 50 bp, synthetic construct
  source 1..50: mol_type = other DNA
tgttcaaactttattacctaaaaatgttgtgttgaaaagaggttgcgcat

SEQ ID NO: 65146 - DNA, 50 bp, synthetic construct
  source 1..50: mol_type = other DNA
ttattcgctgactctattaatcaatggcaggtaacgcagtcagcgtacct

SEQ ID NO: 65147 - DNA, 50 bp, synthetic construct
  source 1..50: mol_type = other DNA
gctcctttggatataagcccgccgcccggaggaggcggcgggcgcgctcg

SEQ ID NO: 65148 - DNA, 50 bp, synthetic construct
  source 1..50: mol_type = other DNA
atagatattgaaacggcatctgacgagctttcgtccgtttggcaggggcg

SEQ ID NO: 65149 - DNA, 50 bp, synthetic construct
  source 1..50: mol_type = other DNA
gccaataatagcaagtgttttcttgaaacaatcaatcagatacaattgaa

SEQ ID NO: 65150 - DNA, 50 bp, synthetic construct
  source 1..50: mol_type = other DNA
ggaatccggaaggacgcggtaaccaaggtttccgggacttaccggatagc

SEQ ID NO: 65151 - DNA, 50 bp, synthetic construct
  source 1..50: mol_type = other DNA
gccggaggattccttttgagaatcttgacgaaagcaaggagagcgaagga

SEQ ID NO: 65152 - DNA, 50 bp, synthetic construct
  source 1..50: mol_type = other DNA
ccgatgttttcgtttgataagaatcagaaatgttcaaagagtttgatcgt

SEQ ID NO: 65153 - DNA, 50 bp, synthetic construct
  source 1..50: mol_type = other DNA
aacataataacatctccttaaacaaaagtataaaaagatgttgacaaaat

SEQ ID NO: 65154 - DNA, 50 bp, synthetic construct
  source 1..50: mol_type = other DNA
tgacaaagactgcatagaagacctccggggactttatggcctcgataccc

SEQ ID NO: 65155 - DNA, 50 bp, synthetic construct
  source 1..50: mol_type = other DNA
tttgacggggttttaaactggtgagctctgctgttgagcataccgtcaaa

SEQ ID NO: 65156 - DNA, 50 bp, synthetic construct
  source 1..50: mol_type = other DNA
gagcttttcccctgaggcgtagttgataccgccatatcctcaaaaaaggg

SEQ ID NO: 65157 - DNA, 50 bp, synthetic construct
  source 1..50: mol_type = other DNA
gcacatggtctgatggccggaaatgcgatttctgcagccgtggccttggc

SEQ ID NO: 65158 - DNA, 50 bp, synthetic construct
  source 1..50: mol_type = other DNA
ttgtactaatgtgacactacccgtcggtgggctgtgttaagttagtacaa

SEQ ID NO: 65159 - DNA, 50 bp, synthetic construct
  source 1..50: mol_type = other DNA
tatcagaacctccgcttcatttcccggaagatgaccatcctcctcacgcc

SEQ ID NO: 65160 - DNA, 50 bp, synthetic construct
  source 1..50: mol_type = other DNA
tgcataagttcttgctttggacttgcagtgtagaagggctggaatatgtg

SEQ ID NO: 65161 - DNA, 50 bp, synthetic construct
  source 1..50: mol_type = other DNA
gtgcggctgatctggcaagaactatgcagttctttgccaatcagcctaaa

SEQ ID NO: 65162 - DNA, 50 bp, synthetic construct
  source 1..50: mol_type = other DNA
cattccagtttttgttcggattgcatgaaatgcggaaaaatgatgacatc

SEQ ID NO: 65163 - DNA, 50 bp, synthetic construct
  source 1..50: mol_type = other DNA
tagccgtttatttctgttttctttatcctgagtgcagaaatgtggtgtat

SEQ ID NO: 65164 - DNA, 50 bp, synthetic construct
  source 1..50: mol_type = other DNA
gtcaatatcggcaaataatgtacccggtcacacaaaccgccgaagtcgat

SEQ ID NO: 65165 - DNA, 50 bp, synthetic construct
  source 1..50: mol_type = other DNA
ggggtcaactgacgtgatgtcataaagctttcatcctgctcgttgcgaaa

SEQ ID NO: 65166 - DNA, 50 bp, synthetic construct
  source 1..50: mol_type = other DNA
gggctttccccttctgcaaaatggtctccctttgcatattcgcaaagcca

SEQ ID NO: 65167 - DNA, 50 bp, synthetic construct
  source 1..50: mol_type = other DNA
gatgtcacttttatcaacatgtaatgctggctgctcgtaaaagtgtgggt

SEQ ID NO: 65168 - DNA, 50 bp, synthetic construct
  source 1..50: mol_type = other DNA
acaaatgcgcgtttgcaaagattacgtaacgaatgcaattttgcactatg

SEQ ID NO: 65169 - DNA, 50 bp, synthetic construct
  source 1..50: mol_type = other DNA
aaaaacaccccatttctcgctccaaatctttcgttaaaatacgtgttttg

SEQ ID NO: 65170 - DNA, 50 bp, synthetic construct
  source 1..50: mol_type = other DNA
tttataatttatgttccttttggaactgtaattatatcataaacacagca

SEQ ID NO: 65171 - DNA, 50 bp, synthetic construct
  source 1..50: mol_type = other DNA
atctttctgagagcaacgattttattcgactgccttgacggaaggaggac

SEQ ID NO: 65172 - DNA, 50 bp, synthetic construct
  source 1..50: mol_type = other DNA
taagcaatactgttccattttttcctgaaaaagctgtggcagtttcattg

SEQ ID NO: 65173 - DNA, 50 bp, synthetic construct
  source 1..50: mol_type = other DNA
aagaatggcaaggcttataaagaaaattcttcaggtgtgcttcctttttt

SEQ ID NO: 65174 - DNA, 50 bp, synthetic construct
  source 1..50: mol_type = other DNA
atcccatcgggctatgtatgcgcccggcagcataagggactaacgggata

SEQ ID NO: 65175 - DNA, 50 bp, synthetic construct
  source 1..50: mol_type = other DNA
tatcaattattttattcatatcgtaattgagcataagcatttttatgata

SEQ ID NO: 65176 - DNA, 50 bp, synthetic construct
  source 1..50: mol_type = other DNA
tccaaaattatattgagggcttgtccacaacgacttaatataccttttaa

SEQ ID NO: 65177 - DNA, 50 bp, synthetic construct
  source 1..50: mol_type = other DNA
gaggagaaaagcgaacaaggggaattttccgtatgttttttttcggggcg

SEQ ID NO: 65178 - DNA, 50 bp, synthetic construct
  source 1..50: mol_type = other DNA
gctacgatactattgccacccggttgaatggggttcaagaggccgtgagt

SEQ ID NO: 65179 - DNA, 50 bp, synthetic construct
  source 1..50: mol_type = other DNA
ctccacactcctatttcatttattaggataaatgctgcacaaagtagtaa

SEQ ID NO: 65180 - DNA, 50 bp, synthetic construct
  source 1..50: mol_type = other DNA
ggtcttgcccttttcggatggagctggctccatccagcaagacactgtga

SEQ ID NO: 65181 - DNA, 50 bp, synthetic construct
  source 1..50: mol_type = other DNA
tcgactcctccttgttgtttatttaaaaagaaataagacggaggataccg

SEQ ID NO: 65182 - DNA, 50 bp, synthetic construct
  source 1..50: mol_type = other DNA
aatggccaaatccgtaaccacgatacatcgtgaaaacaaagcaggtcagg

SEQ ID NO: 65183 - DNA, 50 bp, synthetic construct
  source 1..50: mol_type = other DNA
ctttgtacagcagttgtaaaaactgtcgtttctatgcaatctgacgaaaa

SEQ ID NO: 65184 - DNA, 50 bp, synthetic construct
  source 1..50: mol_type = other DNA
ctgaatcggcgaaaagtccacgattattctgccacatttcgccggaaaag

SEQ ID NO: 65185 - DNA, 50 bp, synthetic construct
  source 1..50: mol_type = other DNA
agggtttgtcaataaaaaacagaaaataatatttcttacttgtcaacact

SEQ ID NO: 65186 - DNA, 50 bp, synthetic construct
  source 1..50: mol_type = other DNA
tataactatatagatataccgacttaatatggtatcttttgacaatatta

SEQ ID NO: 65187 - DNA, 50 bp, synthetic construct
  source 1..50: mol_type = other DNA
tgcctcctttatactccgcttacagttcacggaaaagttacaaaacggca

SEQ ID NO: 65188 - DNA, 50 bp, synthetic construct
  source 1..50: mol_type = other DNA
cccggtgtggcacggcggcgatcacgtcttttccgtgctgccaccgaggg

SEQ ID NO: 65189 - DNA, 50 bp, synthetic construct
  source 1..50: mol_type = other DNA
tcaatggtgatacgttcggatttttgaaatgcaggacggcggcaagatcg

SEQ ID NO: 65190 - DNA, 50 bp, synthetic construct
  source 1..50: mol_type = other DNA
agtgcgcgggcttttttttattgccgtcatccatatctagcccgcgcatg

SEQ ID NO: 65191 - DNA, 50 bp, synthetic construct
  source 1..50: mol_type = other DNA
gtatatgacggcagggcgctgatcgaaaggagcagcaatggcaagcaatg

SEQ ID NO: 65192 - DNA, 50 bp, synthetic construct
  source 1..50: mol_type = other DNA
gcccgctgagggtcattaccttaccacgacggggatctccatcagccggg

SEQ ID NO: 65193 - DNA, 50 bp, synthetic construct
  source 1..50: mol_type = other DNA
tcagcaaggtggcataagggtccgaaaggagaaaaaacgacccttttgct

SEQ ID NO: 65194 - DNA, 50 bp, synthetic construct
  source 1..50: mol_type = other DNA
agtatcaatattaaagaatgaaaaatcgttcaaatgactggataaatact

SEQ ID NO: 65195 - DNA, 50 bp, synthetic construct
  source 1..50: mol_type = other DNA
gctcaaagctgtccgacagcggcgtagagaattgtcaataagaagtgagc

SEQ ID NO: 65196 - DNA, 50 bp, synthetic construct
  source 1..50: mol_type = other DNA
tgtaccggcggtcggtaatataaaaatgactgtgaccgaccgtgctgctg

SEQ ID NO: 65197 - DNA, 50 bp, synthetic construct
  source 1..50: mol_type = other DNA
tggagcggtctttccatcgtttcacgtgatccccaaggaaatccgccgca

SEQ ID NO: 65198 - DNA, 50 bp, synthetic construct
  source 1..50: mol_type = other DNA
ccagccatttcagcggaatatactgcacgatatgccggaaaaggagctgg

SEQ ID NO: 65199 - DNA, 50 bp, synthetic construct
  source 1..50: mol_type = other DNA
accagtttcttgaattccggcgtgtactgatcaatgatcaagaagtacga

SEQ ID NO: 65200 - DNA, 50 bp, synthetic construct
  source 1..50: mol_type = other DNA
gcaaatcctcttctacctctttcggcagaaaggagtagagcgcaatgaac

SEQ ID NO: 65201 - DNA, 50 bp, synthetic construct
  source 1..50: mol_type = other DNA
tttctcattaattattattaaactctttcataataataatataaaaataa

SEQ ID NO: 65202 - DNA, 50 bp, synthetic construct
  source 1..50: mol_type = other DNA
cttttcattatgtatgccttccttataagaaatatgtgcataacaatgtc

SEQ ID NO: 65203 - DNA, 50 bp, synthetic construct
  source 1..50: mol_type = other DNA
attatttaaaaattcctgctttgtcaacatctgaaaaataattgaataat

SEQ ID NO: 65204 - DNA, 50 bp, synthetic construct
  source 1..50: mol_type = other DNA
tcgggcggtctgtgttcttgccgctgacgggaggtgtgccacccgtcaga

SEQ ID NO: 65205 - DNA, 50 bp, synthetic construct
  source 1..50: mol_type = other DNA
ctgccgtaaaaaagcgtaaaaaaaatttctgttacagaacattacggcat

SEQ ID NO: 65206 - DNA, 50 bp, synthetic construct
  source 1..50: mol_type = other DNA
atacaacggcgataaaaacgaaatgtatcttattttcttcgctcatatat

SEQ ID NO: 65207 - DNA, 50 bp, synthetic construct
  source 1..50: mol_type = other DNA
gtgaggggctggggctgattgcagccctgttcgactcctcagcagctcac

SEQ ID NO: 65208 - DNA, 50 bp, synthetic construct
  source 1..50: mol_type = other DNA
agaagaagcgtgaaaaggcctgcgacaaaaggccttttataccggacttg

SEQ ID NO: 65209 - DNA, 50 bp, synthetic construct
  source 1..50: mol_type = other DNA
aatctgatcgtacactaccatagcacgctatggaggggggtgatcgtgtg

SEQ ID NO: 65210 - DNA, 50 bp, synthetic construct
  source 1..50: mol_type = other DNA
catgggggactgcgggtcaaagcacacgccatatgtcgcaatcccgatta

SEQ ID NO: 65211 - DNA, 50 bp, synthetic construct
  source 1..50: mol_type = other DNA
tgctattggtgacaaggaagaaatatctttctccccttatttagctgaaa

SEQ ID NO: 65212 - DNA, 50 bp, synthetic construct
  source 1..50: mol_type = other DNA
atttgttcagcaaacactcacatgggcagttgctaattttttaagcaact

SEQ ID NO: 65213 - DNA, 50 bp, synthetic construct
  source 1..50: mol_type = other DNA
tcatcaccttttatgccctgctgaagcaggcatggcggaaaagcatctga

SEQ ID NO: 65214 - DNA, 50 bp, synthetic construct
  source 1..50: mol_type = other DNA
ttcttctcggcagcggccttctgcgcggtgtcaaaggtgcgcgtgacgaa

SEQ ID NO: 65215 - DNA, 50 bp, synthetic construct
  source 1..50: mol_type = other DNA
cttataaatatcggtgtagcctgcggtatgggctgtcccatatttttatg

SEQ ID NO: 65216 - DNA, 50 bp, synthetic construct
  source 1..50: mol_type = other DNA
agcgtgattttcccagcgggcttgtacaacttctcttgccatctcaatct

SEQ ID NO: 65217 - DNA, 50 bp, synthetic construct
  source 1..50: mol_type = other DNA
atgtgagaggttcagatacaccttttatgaagtataggaaccggaaacat

SEQ ID NO: 65218 - DNA, 50 bp, synthetic construct
  source 1..50: mol_type = other DNA
aacgcggacgtttttcagcagatgttcctatgctagaaaagttatgcgtt

SEQ ID NO: 65219 - DNA, 50 bp, synthetic construct
  source 1..50: mol_type = other DNA
ctcaaaatagcgggtgccggtgcacatcactggtgttgccctatttttct

SEQ ID NO: 65220 - DNA, 50 bp, synthetic construct
  source 1..50: mol_type = other DNA
atatcagaaaaaggaaatggacttcgaacaagtaatctctttttacctat

SEQ ID NO: 65221 - DNA, 50 bp, synthetic construct
  source 1..50: mol_type = other DNA
gcaagaacataaaagaggaaacagggcttttgcctctggctcgtttcgga

SEQ ID NO: 65222 - DNA, 50 bp, synthetic construct
  source 1..50: mol_type = other DNA
ctaataatcaatcttttgtgcaaatattttatttggaaattcaatatttg

SEQ ID NO: 65223 - DNA, 50 bp, synthetic construct
  source 1..50: mol_type = other DNA
acttcccagtattttagataatccatgtaatatacccaaccacgggctga

SEQ ID NO: 65224 - DNA, 50 bp, synthetic construct
  source 1..50: mol_type = other DNA
tttttgtgcttatgagggtaaacctaaaagtgcatccagcagcttgaaaa

SEQ ID NO: 65225 - DNA, 50 bp, synthetic construct
  source 1..50: mol_type = other DNA
agttcctgcagtacatctagcttccggaagctgtaaactctacgaataaa

SEQ ID NO: 65226 - DNA, 50 bp, synthetic construct
  source 1..50: mol_type = other DNA
atttaagttggattttacaaactgacctattttcataatcgaaaataggt

SEQ ID NO: 65227 - DNA, 50 bp, synthetic construct
  source 1..50: mol_type = other DNA
tgatgtttattgattataataatattcattattataacttaaatcaaaga

SEQ ID NO: 65228 - DNA, 50 bp, synthetic construct
  source 1..50: mol_type = other DNA
tcgtaaatcttcctttcttgtgttataacaaaagtgatgaggatttgccg

SEQ ID NO: 65229 - DNA, 50 bp, synthetic construct
  source 1..50: mol_type = other DNA
gtttaatgaagggaaaaaggggactagtccaccatttagggcataaaaaa

SEQ ID NO: 65230 - DNA, 50 bp, synthetic construct
  source 1..50: mol_type = other DNA
cttggaaagcagcataaaacggcccggcccattttaggcggctttttatt

SEQ ID NO: 65231 - DNA, 50 bp, synthetic construct
  source 1..50: mol_type = other DNA
tatgctgcaaagatgatatcctccccggaggaaaggagggctggcgtatg

SEQ ID NO: 65232 - DNA, 50 bp, synthetic construct
  source 1..50: mol_type = other DNA
ctactaaatacatattttacctcctattacatacaatatgtataaagaag

SEQ ID NO: 65233 - DNA, 50 bp, synthetic construct
  source 1..50: mol_type = other DNA
cggaaatagtatgagattctatgcatctttcgaatcttatcttagtttat

SEQ ID NO: 65234 - DNA, 50 bp, synthetic construct
  source 1..50: mol_type = other DNA
tattattatttttttgcattaaaaaatcagctttgaaatattatataata

SEQ ID NO: 65235 - DNA, 50 bp, synthetic construct
  source 1..50: mol_type = other DNA
gaaggaggagaaaagcatgttactgaggtacgaatacttcctggttattt

SEQ ID NO: 65236 - DNA, 50 bp, synthetic construct
  source 1..50: mol_type = other DNA
cttgtagacccaagccgcgcagaggcccctgcgacgcagcaaaaaacaaa

SEQ ID NO: 65237 - DNA, 50 bp, synthetic construct
  source 1..50: mol_type = other DNA
gtggaatcagcactggacgaattaaatggtcgcttctctgcttattgaga

SEQ ID NO: 65238 - DNA, 50 bp, synthetic construct
  source 1..50: mol_type = other DNA
gtttttggcataaaaataatacctccagggattaaaacggggctgaatat

SEQ ID NO: 65239 - DNA, 50 bp, synthetic construct
  source 1..50: mol_type = other DNA
ttcgaaaggatcatagaaaacctttgtgcgttttccctgccccgacctgt

SEQ ID NO: 65240 - DNA, 50 bp, synthetic construct
  source 1..50: mol_type = other DNA
taatctccgccagaaacggtgaaaaaatcgtccgcagggcgcgattatta

SEQ ID NO: 65241 - DNA, 50 bp, synthetic construct
  source 1..50: mol_type = other DNA
aagagcatttttttattttctcgctgctctgaatacttgaaaatgaaggg

SEQ ID NO: 65242 - DNA, 50 bp, synthetic construct
  source 1..50: mol_type = other DNA
attatttttactggtacagagttcatcaaatatgttataataaaaatgaa

SEQ ID NO: 65243 - DNA, 50 bp, synthetic construct
  source 1..50: mol_type = other DNA
aacagcgccacctccttctacaagatcgagtagagcaccgtgccgccgcg

SEQ ID NO: 65244 - DNA, 50 bp, synthetic construct
  source 1..50: mol_type = other DNA
tagttatttcaccttttataaggcattttctataaatgtaaaaacaccct

SEQ ID NO: 65245 - DNA, 50 bp, synthetic construct
  source 1..50: mol_type = other DNA
ttgttttgcctgcggctgtcagctttcatcgactacagcacatccgtcaa

SEQ ID NO: 65246 - DNA, 50 bp, synthetic construct
  source 1..50: mol_type = other DNA
attaaaatttctccttccgtatgccatcatacacaggagactatattcat

SEQ ID NO: 65247 - DNA, 50 bp, synthetic construct
  source 1..50: mol_type = other DNA
aagcgtggcgacaagagatattatacttcctggcccgggcatcctcgtcc

SEQ ID NO: 65248 - DNA, 50 bp, synthetic construct
  source 1..50: mol_type = other DNA
aaatagctatcatattatcactcctaaatttgaatttattatatctattt

SEQ ID NO: 65249 - DNA, 50 bp, synthetic construct
  source 1..50: mol_type = other DNA
gaatggtgttacttttaaccagaggaatggcgaaaaaagttacagttatc

SEQ ID NO: 65250 - DNA, 50 bp, synthetic construct
  source 1..50: mol_type = other DNA
aaagggtctgctgcagtatctgcgtacgccgaccttgcaaatgaaagcat

SEQ ID NO: 65251 - DNA, 50 bp, synthetic construct
  source 1..50: mol_type = other DNA
tcgtagtctttttcctcaatttgcctgcagcagaaggagaaagaatatga

SEQ ID NO: 65252 - DNA, 50 bp, synthetic construct
  source 1..50: mol_type = other DNA
tgcgttcatggtttgacttccttcctgaagaaagtcattcttttgaatca

SEQ ID NO: 65253 - DNA, 50 bp, synthetic construct
  source 1..50: mol_type = other DNA
caaacggttactgagggtggatgcaaatttcaattgcaaaaaacatatca

SEQ ID NO: 65254 - DNA, 50 bp, synthetic construct
  source 1..50: mol_type = other DNA
ggagcataaaaaaatgaaacagatcaatctgttctagtttttctgcattc

SEQ ID NO: 65255 - DNA, 50 bp, synthetic construct
  source 1..50: mol_type = other DNA
ggtgggatagaagaataaagaaaagtttttctgcattcagcctgccattg

SEQ ID NO: 65256 - DNA, 50 bp, synthetic construct
  source 1..50: mol_type = other DNA
gcggagtatcctgaatttcaaggtgaacgaataaatggcaatggctcaga

SEQ ID NO: 65257 - DNA, 50 bp, synthetic construct
  source 1..50: mol_type = other DNA
tgcgccacgattaaagaggatgaagctatatcttctgcgacaaagcgcgt

SEQ ID NO: 65258 - DNA, 50 bp, synthetic construct
  source 1..50: mol_type = other DNA
ttttggcattttttccatctccttgtatgcgcccagcggaattgccaaaa

SEQ ID NO: 65259 - DNA, 50 bp, synthetic construct
  source 1..50: mol_type = other DNA
gtaagtcatgacaacgcctccacgatcttggcggaatttttgttactttt

SEQ ID NO: 65260 - DNA, 50 bp, synthetic construct
  source 1..50: mol_type = other DNA
ctctctaaggtttttcggcgtgcagctgcacggtttccgtgtttaccgtg

SEQ ID NO: 65261 - DNA, 50 bp, synthetic construct
  source 1..50: mol_type = other DNA
atcaagtcaatcccgcggtataaacttgtatcttattctccgaccttgac

SEQ ID NO: 65262 - DNA, 50 bp, synthetic construct
  source 1..50: mol_type = other DNA
cctggtgctggagcagggcagcgcggaccctgtaccgcgtaacaacgggg

SEQ ID NO: 65263 - DNA, 50 bp, synthetic construct
  source 1..50: mol_type = other DNA
gtcctttgatgcggagctcatcgagtggtattatatccgcattgcaggaa

SEQ ID NO: 65264 - DNA, 50 bp, synthetic construct
  source 1..50: mol_type = other DNA
catatcatcagtttcttcttccagttctgtgagcagttcggactgacccc

SEQ ID NO: 65265 - DNA, 50 bp, synthetic construct
  source 1..50: mol_type = other DNA
cgtggcaaagaaaaattcctttcggcaatcagccccgcccgttttgttgg

SEQ ID NO: 65266 - DNA, 50 bp, synthetic construct
  source 1..50: mol_type = other DNA
aggcagaccgcatgatctatatcacctgaacagtatcatgtggtctatga

SEQ ID NO: 65267 - DNA, 50 bp, synthetic construct
  source 1..50: mol_type = other DNA
agtacatcagaagctttggcagtactccctgcaaaagcaggacgaaaact

SEQ ID NO: 65268 - DNA, 50 bp, synthetic construct
  source 1..50: mol_type = other DNA
tcctttgacaatatatttgtcaatagagtgatatatagtgtcggaaagga

SEQ ID NO: 65269 - DNA, 50 bp, synthetic construct
  source 1..50: mol_type = other DNA
tatttgtttcctgcatgacatcatccgaaaaatactgcaggtaacaaatg

SEQ ID NO: 65270 - DNA, 50 bp, synthetic construct
  source 1..50: mol_type = other DNA
atgcccaagagctccattgcaagaaaccttgacatggagcggatggggca

SEQ ID NO: 65271 - DNA, 50 bp, synthetic construct
  source 1..50: mol_type = other DNA
cacatgagattaattaagagaggaaaaccttgtaaaatcaacctttcttg

SEQ ID NO: 65272 - DNA, 50 bp, synthetic construct
  source 1..50: mol_type = other DNA
catattcgatttttgggtaagctccgaaaaaatttcaaaaattaagtatt

SEQ ID NO: 65273 - DNA, 50 bp, synthetic construct
  source 1..50: mol_type = other DNA
tgccagctgctcctgcccctgatccggacatggatgaaaagcggctggta

SEQ ID NO: 65274 - DNA, 50 bp, synthetic construct
  source 1..50: mol_type = other DNA
ggcgttgtgtgccggaaaggggaagcttctcctttgtgggtatccgggtc

SEQ ID NO: 65275 - DNA, 50 bp, synthetic construct
  source 1..50: mol_type = other DNA
tgtgactgccagataattggatccagtttatcatcttccaggcagtcacg

SEQ ID NO: 65276 - DNA, 50 bp, synthetic construct
  source 1..50: mol_type = other DNA
gcattttatcaactccattcaaaaaagtttgaactcgtccattgttatga

SEQ ID NO: 65277 - DNA, 50 bp, synthetic construct
  source 1..50: mol_type = other DNA
attagtatacttgattcagggtgtttttatcctgcttttattatataaag

SEQ ID NO: 65278 - DNA, 50 bp, synthetic construct
  source 1..50: mol_type = other DNA
gctctacaccggcctgaacttcgggcagaggacgatatccgggtgtagcg

SEQ ID NO: 65279 - DNA, 50 bp, synthetic construct
  source 1..50: mol_type = other DNA
tttgcaatccatattatcaccttttaaaaagggtgatttgttatgaaaaa

SEQ ID NO: 65280 - DNA, 50 bp, synthetic construct
  source 1..50: mol_type = other DNA
gacaaattaatcacctctttaaagaattgtaaagagtttatttggcttat

SEQ ID NO: 65281 - DNA, 50 bp, synthetic construct
  source 1..50: mol_type = other DNA
aaaagctccagtgttgttatctccatatagataaatccaccgaagaatta

SEQ ID NO: 65282 - DNA, 50 bp, synthetic construct
  source 1..50: mol_type = other DNA
caacatgcctttgtcatgatcaagcgcttgtgcagatgctctcggaggtg

SEQ ID NO: 65283 - DNA, 50 bp, synthetic construct
  source 1..50: mol_type = other DNA
tggccaaatccgtaaccacgataccggcttctttattacggtcttgccca

SEQ ID NO: 65284 - DNA, 50 bp, synthetic construct
  source 1..50: mol_type = other DNA
aaatcttataattaaaaattcttatctaagtcatttggtgccgatgattt

SEQ ID NO: 65285 - DNA, 50 bp, synthetic construct
  source 1..50: mol_type = other DNA
atacctccttccgttttggtagtctagatggcaaaagaagacctttttat

SEQ ID NO: 65286 - DNA, 50 bp, synthetic construct
  source 1..50: mol_type = other DNA
taatcaattaagccagaaaatcttcgaagataatccagcatccagccaat

SEQ ID NO: 65287 - DNA, 50 bp, synthetic construct
  source 1..50: mol_type = other DNA
tttcctgctcgaacaattctgcatcgatgcacacttcctgttccagcatg

SEQ ID NO: 65288 - DNA, 50 bp, synthetic construct
  source 1..50: mol_type = other DNA
atatccttgtggagtgctttttgtttacaaatatcactctctataccttt

SEQ ID NO: 65289 - DNA, 50 bp, synthetic construct
  source 1..50: mol_type = other DNA
tttttataatttttacatttttatttttatgaacaaaaaaattaatgcag

SEQ ID NO: 65290 - DNA, 50 bp, synthetic construct
  source 1..50: mol_type = other DNA
ccttgcgcaaaaacgggggctttgtaacaactccgtcaccgtccgcatct

SEQ ID NO: 65291 - DNA, 50 bp, synthetic construct
  source 1..50: mol_type = other DNA
caatgatctgtccgttcttgagctgcagcatgaacgccgtaacagacatt

SEQ ID NO: 65292 - DNA, 50 bp, synthetic construct
  source 1..50: mol_type = other DNA
ccatgctgttcacctccctctgcagctggaggcggatgcacagagcgcgc

SEQ ID NO: 65293 - DNA, 50 bp, synthetic construct
  source 1..50: mol_type = other DNA
cctcaaaatctacgaagccgccattgatggtcggtggaatgacggtgacc

SEQ ID NO: 65294 - DNA, 50 bp, synthetic construct
  source 1..50: mol_type = other DNA
gcgacgctgtcacgcttcacgtcggccaccgaacaaaatgagtaccgtgg

SEQ ID NO: 65295 - DNA, 50 bp, synthetic construct
  source 1..50: mol_type = other DNA
gtgttgatacggtttatttcgtcgagcgacgggaaaaagcaagagaatca

SEQ ID NO: 65296 - DNA, 50 bp, synthetic construct
  source 1..50: mol_type = other DNA
tcatcaatggagtattctgcgtgcctgttcatagaaggagaacactatga

SEQ ID NO: 65297 - DNA, 50 bp, synthetic construct
  source 1..50: mol_type = other DNA
catagaacggcagtgcgttcattcaaaaacttacgtttctaggtgctatt

SEQ ID NO: 65298 - DNA, 50 bp, synthetic construct
  source 1..50: mol_type = other DNA
gatgcaaattatatcgaaaagaaataccaattttaaatatattttacaaa

SEQ ID NO: 65299 - DNA, 50 bp, synthetic construct
  source 1..50: mol_type = other DNA
gcaatgcagaattaaatccaacaatatcgcatggaacaatactgcattta

SEQ ID NO: 65300 - DNA, 50 bp, synthetic construct
  source 1..50: mol_type = other DNA
agcgaggtgccgacaggcatttatgtgagattgcgcgtcagctggtacac

SEQ ID NO: 65301 - DNA, 50 bp, synthetic construct
  source 1..50: mol_type = other DNA
gaatcacctcctttattttacattcaaatgttgatggaggcagttcgatc

SEQ ID NO: 65302 - DNA, 50 bp, synthetic construct
  source 1..50: mol_type = other DNA
tttatttggaaaactcccttgctgaagggatagagcgttgggaaaatgaa

SEQ ID NO: 65303 - DNA, 50 bp, synthetic construct
  source 1..50: mol_type = other DNA
tgtagcatattctcggcctcctccaatgagtcgtccgagcgcatgggctc

SEQ ID NO: 65304 - DNA, 50 bp, synthetic construct
  source 1..50: mol_type = other DNA
aataatcttttgcacgttttaatttaaatctacatttaataaaaaaaata

SEQ ID NO: 65305 - DNA, 50 bp, synthetic construct
  source 1..50: mol_type = other DNA
cagacgatttcttcaaaattacaatctacccttattcaggaaacccgcag

SEQ ID NO: 65306 - DNA, 50 bp, synthetic construct
  source 1..50: mol_type = other DNA
tttgcggtctttcttttgcggtcatgtgattccgaaagatctgccataaa

SEQ ID NO: 65307 - DNA, 50 bp, synthetic construct
  source 1..50: mol_type = other DNA
ggtgtccacggccatgcaggtagaggtcgccctgcatgatgtgacttccg

SEQ ID NO: 65308 - DNA, 50 bp, synthetic construct
  source 1..50: mol_type = other DNA
attggctggatgctggatcatcttcgaagattttctggcttaattgatta

SEQ ID NO: 65309 - DNA, 50 bp, synthetic construct
  source 1..50: mol_type = other DNA
tagcataattaccgtttttcatgaaacgatgaaaaccctgtattaggaac

SEQ ID NO: 65310 - DNA, 50 bp, synthetic construct
  source 1..50: mol_type = other DNA
gacaaaaaaacaatcatcagttttgaaaaaatggaggtttttaatttgga

SEQ ID NO: 65311 - DNA, 50 bp, synthetic construct
  source 1..50: mol_type = other DNA
cgctcgtaggctgtccgggactttcaggggtagcccgccgcttattttgt

SEQ ID NO: 65312 - DNA, 50 bp, synthetic construct
  source 1..50: mol_type = other DNA
ccttgtaattatttctatctctgctttgtgttataggtataattactttg

SEQ ID NO: 65313 - DNA, 50 bp, synthetic construct
  source 1..50: mol_type = other DNA
tgatgattaaaagttataaatatttaattatttctattttttaatggcat

SEQ ID NO: 65314 - DNA, 50 bp, synthetic construct
  source 1..50: mol_type = other DNA
gaaacaggaacactgtcaacatagcagtgctttgacaggtgacgggatgg

SEQ ID NO: 65315 - DNA, 50 bp, synthetic construct
  source 1..50: mol_type = other DNA
gatcaccatcgtcgatgcctgcttcgacgtccactgtctcgatgaacatc

SEQ ID NO: 65316 - DNA, 50 bp, synthetic construct
  source 1..50: mol_type = other DNA
tcatccagaaaaacaagcttttcaggcgaaaagcctgatggaaaaagtga

SEQ ID NO: 65317 - DNA, 50 bp, synthetic construct
  source 1..50: mol_type = other DNA
ggcagatagaggtattgaacgccagcccggctccataacctgaaacggaa

SEQ ID NO: 65318 - DNA, 50 bp, synthetic construct
  source 1..50: mol_type = other DNA
atggttctaaagtatggaattcaaatatatgtttgctatattagtatgga

SEQ ID NO: 65319 - DNA, 50 bp, synthetic construct
  source 1..50: mol_type = other DNA
agtaaagtctggattcttgcaatatataatacaaaaatccagctttttag

SEQ ID NO: 65320 - DNA, 50 bp, synthetic construct
  source 1..50: mol_type = other DNA
aaaacgtgatacacttttggtcacgattgtacttgctattattggctttc

SEQ ID NO: 65321 - DNA, 50 bp, synthetic construct
  source 1..50: mol_type = other DNA
attctgcgaaatcgcccgtgagatattttttggtgtcgatttcgcaccaa

SEQ ID NO: 65322 - DNA, 50 bp, synthetic construct
  source 1..50: mol_type = other DNA
cctttaatttcccgtcatgccgtgataattacatgaagcatcaacaatgt

SEQ ID NO: 65323 - DNA, 50 bp, synthetic construct
  source 1..50: mol_type = other DNA
ttactttcttcatgtgttcgctcatgtgtgcgagggcctgaacaaatacc

SEQ ID NO: 65324 - DNA, 50 bp, synthetic construct
  source 1..50: mol_type = other DNA
gtgtagatctcataaccgagcagccggtatggtctttactttcttttgga

SEQ ID NO: 65325 - DNA, 50 bp, synthetic construct
  source 1..50: mol_type = other DNA
gtcctccttccgtcaaggcagtcgaataaaatcgttgctctcagaaagat

SEQ ID NO: 65326 - DNA, 50 bp, synthetic construct
  source 1..50: mol_type = other DNA
tcatagtcaatccatcctttctgaaatcggactataatgcctctcgttgg

SEQ ID NO: 65327 - DNA, 50 bp, synthetic construct
  source 1..50: mol_type = other DNA
gtgaatatgagttgaataaaacgctttcatatccacacgctcacattcaa

SEQ ID NO: 65328 - DNA, 50 bp, synthetic construct
  source 1..50: mol_type = other DNA
ttttgaatacatttttcgtttttcatcaaaaaagaaaaaacggcaggaaa

SEQ ID NO: 65329 - DNA, 50 bp, synthetic construct
  source 1..50: mol_type = other DNA
caaatatactgcacgaacttaggccgtattcatcatgtgcgtgatattcg

SEQ ID NO: 65330 - DNA, 50 bp, synthetic construct
  source 1..50: mol_type = other DNA
cgctttctgcaattatgcgattttcaagcaataccgtattgcccgaagag

SEQ ID NO: 65331 - DNA, 50 bp, synthetic construct
  source 1..50: mol_type = other DNA
ttttatggtatctaacaaatgttagacggaatttgttagattatatcgtt

SEQ ID NO: 65332 - DNA, 50 bp, synthetic construct
  source 1..50: mol_type = other DNA
tatttgaaaaatgacccggttcttaattcatcctcgttgctttccacatc

SEQ ID NO: 65333 - DNA, 50 bp, synthetic construct
  source 1..50: mol_type = other DNA
gaagtcgccgaaagcgatagagagcggactttttcgctttatggatctta

SEQ ID NO: 65334 - DNA, 50 bp, synthetic construct
  source 1..50: mol_type = other DNA
tcgcagacgaggaaatggtcagtggtgaccgaccggactgtcgcggtgct

SEQ ID NO: 65335 - DNA, 50 bp, synthetic construct
  source 1..50: mol_type = other DNA
ccacatgaagggagacggcgtcgatctcgattttctctgcttgcagtgtc

SEQ ID NO: 65336 - DNA, 50 bp, synthetic construct
  source 1..50: mol_type = other DNA
cacgcctgcgcctgatccagtccaggcgccgctggacggccagccacgtg

SEQ ID NO: 65337 - DNA, 50 bp, synthetic construct
  source 1..50: mol_type = other DNA
tacgatgaattttgcaatcagaaagtatttttgcatcaagaatccttata

SEQ ID NO: 65338 - DNA, 50 bp, synthetic construct
  source 1..50: mol_type = other DNA
cttttccggtgtgcaaagaaactttcatgtttcttggttttggtgaaata

SEQ ID NO: 65339 - DNA, 50 bp, synthetic construct
  source 1..50: mol_type = other DNA
cctggataatctgttcataagataattactatgataacgaattaaaaaag

SEQ ID NO: 65340 - DNA, 50 bp, synthetic construct
  source 1..50: mol_type = other DNA
aaaacaggggaaaaatcatccaaagcagcatgtgattgcagatgtgattg

SEQ ID NO: 65341 - DNA, 50 bp, synthetic construct
  source 1..50: mol_type = other DNA
ggaatacgaattttcaaacgatcagaagataatacaaatggtcgtatttc

SEQ ID NO: 65342 - DNA, 50 bp, synthetic construct
  source 1..50: mol_type = other DNA
acattctcatgtgccggcctcctttcgtcaaggccggcggcgtgcatcgt

SEQ ID NO: 65343 - DNA, 50 bp, synthetic construct
  source 1..50: mol_type = other DNA
gcggacgggcagctgacgctggcggacacatccaccttctcattgtctac

SEQ ID NO: 65344 - DNA, 50 bp, synthetic construct
  source 1..50: mol_type = other DNA
tttttctttttttctccccactcgtaacagcggggtttccgggtgattta

SEQ ID NO: 65345 - DNA, 50 bp, synthetic construct
  source 1..50: mol_type = other DNA
ctcctttcaaaaataaagcctattttctttattgttttttttgacaggag

SEQ ID NO: 65346 - DNA, 50 bp, synthetic construct
  source 1..50: mol_type = other DNA
ggacagaaaaaagtccgcatccagcagtggtgaggagccgttttctgtct

SEQ ID NO: 65347 - DNA, 50 bp, synthetic construct
  source 1..50: mol_type = other DNA
ttgatttttcgcataaaatcagctccacctgcgtttcttcgagaagctgg

SEQ ID NO: 65348 - DNA, 50 bp, synthetic construct
  source 1..50: mol_type = other DNA
atatcgcacttagccaacggtcggcaccgtggcggtcttggcatagatat

SEQ ID NO: 65349 - DNA, 50 bp, synthetic construct
  source 1..50: mol_type = other DNA
acatcccacgcccctttacatcctccaccctggaaaggtgcgtcagtgga

SEQ ID NO: 65350 - DNA, 50 bp, synthetic construct
  source 1..50: mol_type = other DNA
cattattgactctcgctttctatgagccgatgaagtgagagtcattgcag

SEQ ID NO: 65351 - DNA, 50 bp, synthetic construct
  source 1..50: mol_type = other DNA
aaaaagcaaataaaaaagagggcctgtcacctgttatttttttgtagtta

SEQ ID NO: 65352 - DNA, 50 bp, synthetic construct
  source 1..50: mol_type = other DNA
tatttcatcaaatgtcataggcaaatttgcctttgctatttatacaacaa

SEQ ID NO: 65353 - DNA, 50 bp, synthetic construct
  source 1..50: mol_type = other DNA
caatatatccgttgttaggtataacgttacttttctttgcgccaattttc

SEQ ID NO: 65354 - DNA, 50 bp, synthetic construct
  source 1..50: mol_type = other DNA
aactttttgcaactaatatttattaaaatgtcaaagcgttgaaaaaacaa

SEQ ID NO: 65355 - DNA, 50 bp, synthetic construct
  source 1..50: mol_type = other DNA
aataatcacttccatcatgtatgagctcaaagaagatggaagtgactatt

SEQ ID NO: 65356 - DNA, 50 bp, synthetic construct
  source 1..50: mol_type = other DNA
aggagtgttggtgtaaggaaaataccagggttccggacaccatcataaag

SEQ ID NO: 65357 - DNA, 50 bp, synthetic construct
  source 1..50: mol_type = other DNA
atttcttatcaaagatacgatataattatttcgtcattttggtattcggc

SEQ ID NO: 65358 - DNA, 50 bp, synthetic construct
  source 1..50: mol_type = other DNA
cgatattgcgaagcgtcaggaatatctaatccttccagttctagctttcg

SEQ ID NO: 65359 - DNA, 50 bp, synthetic construct
  source 1..50: mol_type = other DNA
ttttcgggatattccataggaacgccctccaaggccgaaaacggcgaaaa

SEQ ID NO: 65360 - DNA, 50 bp, synthetic construct
  source 1..50: mol_type = other DNA
tcttcctttcccatgatatatattttcctgatcttcaaggatcatctgct

SEQ ID NO: 65361 - DNA, 50 bp, synthetic construct
  source 1..50: mol_type = other DNA
caatcttctctgataaattccatattgctgaaattcttaaggtcatgcag

SEQ ID NO: 65362 - DNA, 50 bp, synthetic construct
  source 1..50: mol_type = other DNA
tcagttttaattaccccgatttctgatgaatcacttaaaattcatcaaaa

SEQ ID NO: 65363 - DNA, 50 bp, synthetic construct
  source 1..50: mol_type = other DNA
gacacccggcagtacgctgccatccgggtcaatgatatgtgccggatctc

SEQ ID NO: 65364 - DNA, 50 bp, synthetic construct
  source 1..50: mol_type = other DNA
ttccttcaaaataagcctcaataaatagattgatttttccttcttctaaa

SEQ ID NO: 65365 - DNA, 50 bp, synthetic construct
  source 1..50: mol_type = other DNA
aagtctgcctcttagaatcgagtggctatgaaactcaggttgagcactat

SEQ ID NO: 65366 - DNA, 50 bp, synthetic construct
  source 1..50: mol_type = other DNA
aacagccaagcacagaacaacagttcactgtggggacgtactttactgac

SEQ ID NO: 65367 - DNA, 50 bp, synthetic construct
  source 1..50: mol_type = other DNA
gctgcaaaaaaccgggctggaaaacatttttatgcccaattttaaacgca

SEQ ID NO: 65368 - DNA, 50 bp, synthetic construct
  source 1..50: mol_type = other DNA
ttttttcaaacataccattcaaactcctttcgagtactttgataaaaaat

SEQ ID NO: 65369 - DNA, 50 bp, synthetic construct
  source 1..50: mol_type = other DNA
acctttccatcttcgtcctccttcgtgaagggggcctgcttgtgaagtat

SEQ ID NO: 65370 - DNA, 50 bp, synthetic construct
  source 1..50: mol_type = other DNA
gatactacctttgcctcgtcttctgcacccagcggggccacagcagcata

SEQ ID NO: 65371 - DNA, 50 bp, synthetic construct
  source 1..50: mol_type = other DNA
tttttataatatccagcgaaatccaaaaatttcacagaagaattattaaa

SEQ ID NO: 65372 - DNA, 50 bp, synthetic construct
  source 1..50: mol_type = other DNA
tgaaaagaaaaagcgccgcaccgccgttcgtgtttaactttgacttttca

SEQ ID NO: 65373 - DNA, 50 bp, synthetic construct
  source 1..50: mol_type = other DNA
tccacggcattgtattaaactcagtacagagatggagggaaaaacgtggc

SEQ ID NO: 65374 - DNA, 50 bp, synthetic construct
  source 1..50: mol_type = other DNA
acaatcatattcatctgtcattttatgagatgataaattgcattgattgt

SEQ ID NO: 65375 - DNA, 50 bp, synthetic construct
  source 1..50: mol_type = other DNA
aaagaaagccgattgattttttcggccttgacggacaatttggtttctgc

SEQ ID NO: 65376 - DNA, 50 bp, synthetic construct
  source 1..50: mol_type = other DNA
cctccagagaagcctctgcaagattgatcgtaaattgtctggcagagcga

SEQ ID NO: 65377 - DNA, 50 bp, synthetic construct
  source 1..50: mol_type = other DNA
ggcgttcctctgtgtatttgccctgcaggaacatagcgtaaatctgctgg

SEQ ID NO: 65378 - DNA, 50 bp, synthetic construct
  source 1..50: mol_type = other DNA
atggaaattattagggattctctgtagattatcgacctaaagacttgata

SEQ ID NO: 65379 - DNA, 50 bp, synthetic construct
  source 1..50: mol_type = other DNA
taaggaggattgattatgtttgaaattttaaacgaaatgtatgccgctga

SEQ ID NO: 65380 - DNA, 50 bp, synthetic construct
  source 1..50: mol_type = other DNA
gctttcatgggatgcacttcgggaggaaatgaaggaaatcgcccggcagc

SEQ ID NO: 65381 - DNA, 50 bp, synthetic construct
  source 1..50: mol_type = other DNA
tcggctcagagtatcggggatgctcccgagttttttatacactcaggaag

SEQ ID NO: 65382 - DNA, 50 bp, synthetic construct
  source 1..50: mol_type = other DNA
actgtccagaccgttgctttaaaataacgcaaattaaattgcacatcaca

SEQ ID NO: 65383 - DNA, 50 bp, synthetic construct
  source 1..50: mol_type = other DNA
aaattgtcttgtactaactagctaacagcatagttagtacaagacgcatc

SEQ ID NO: 65384 - DNA, 50 bp, synthetic construct
  source 1..50: mol_type = other DNA
gtggatggaaaaatcaccatctgcgaagagattgtgattctgctttccaa

SEQ ID NO: 65385 - DNA, 50 bp, synthetic construct
  source 1..50: mol_type = other DNA
gaaagggatatttgtataatgcaggggtgcatggaggaaacatggcagaa

SEQ ID NO: 65386 - DNA, 50 bp, synthetic construct
  source 1..50: mol_type = other DNA
attagttattcagggcaataaaatatttattatctgcctgaaacgaaaac

SEQ ID NO: 65387 - DNA, 50 bp, synthetic construct
  source 1..50: mol_type = other DNA
cagatattgttgaagttgttccagatcgataacggcaataccattatcta

SEQ ID NO: 65388 - DNA, 50 bp, synthetic construct
  source 1..50: mol_type = other DNA
cgggttgcagcctactgccgtgtatcagcaatgcagtagcgtgtgacctt

SEQ ID NO: 65389 - DNA, 50 bp, synthetic construct
  source 1..50: mol_type = other DNA
aagctgcccgctctgaggcatatcattgcatggaccagaggatcaatgac

SEQ ID NO: 65390 - DNA, 50 bp, synthetic construct
  source 1..50: mol_type = other DNA
ataaattccataattacctggaagtatatcgaactaattattaatgtaaa

SEQ ID NO: 65391 - DNA, 50 bp, synthetic construct
  source 1..50: mol_type = other DNA
ctgaaaaaatagaacgatatccagtgtgccatatcaatctatcctttcct

SEQ ID NO: 65392 - DNA, 50 bp, synthetic construct
  source 1..50: mol_type = other DNA
catcgtgtgcggcctgggcggcaaggccgtggccaaggtcaacaccctgt

SEQ ID NO: 65393 - DNA, 50 bp, synthetic construct
  source 1..50: mol_type = other DNA
atcaaaaagctcctgggaaaaacggtacccttttttaggaggtctttgat

SEQ ID NO: 65394 - DNA, 50 bp, synthetic construct
  source 1..50: mol_type = other DNA
ctggcgtattgccctggatgggtgaaatagaagattgcacatgaaaaaag

SEQ ID NO: 65395 - DNA, 50 bp, synthetic construct
  source 1..50: mol_type = other DNA
ttggggaaaatcgggtgtaaatatacctccgctgttttgatttttgggag

SEQ ID NO: 65396 - DNA, 50 bp, synthetic construct
  source 1..50: mol_type = other DNA
gtcttgaatagcaaaatcaagaaatttttctttatgcggctcatcaaggg

SEQ ID NO: 65397 - DNA, 50 bp, synthetic construct
  source 1..50: mol_type = other DNA
ttcgtccgtcagcgtaatatgcagatctacacaaaggaaaagcacccgac

SEQ ID NO: 65398 - DNA, 50 bp, synthetic construct
  source 1..50: mol_type = other DNA
aaatcactcctttccgacaccatacatgggcagtgccatagaagtgatca

SEQ ID NO: 65399 - DNA, 50 bp, synthetic construct
  source 1..50: mol_type = other DNA
agttgctatatctttcttagtggtataccactaaaaacgaaaaaaactgc

SEQ ID NO: 65400 - DNA, 50 bp, synthetic construct
  source 1..50: mol_type = other DNA
ttgttgttcccaaacatcccgttcaatagatggaggccggggtggaagcc

SEQ ID NO: 65401 - DNA, 50 bp, synthetic construct
  source 1..50: mol_type = other DNA
gcttttctcctttttttcaactgttgaggaagaaaacaaacgagaaatgg

SEQ ID NO: 65402 - DNA, 50 bp, synthetic construct
  source 1..50: mol_type = other DNA
gggttactatatattcgctctgaacatttagagtgattaatagtactacc

SEQ ID NO: 65403 - DNA, 50 bp, synthetic construct
  source 1..50: mol_type = other DNA
cttttcaggcattttcagttataatagtactaccgaaaatggaaaggaga

SEQ ID NO: 65404 - DNA, 50 bp, synthetic construct
  source 1..50: mol_type = other DNA
tattcttcctcatatatccaagctgaaagatgaatagagaaggaaaaaaa

SEQ ID NO: 65405 - DNA, 50 bp, synthetic construct
  source 1..50: mol_type = other DNA
gctggtgcgggaaggcttcgatcatcacgatccagttcacccgcgccggg

SEQ ID NO: 65406 - DNA, 50 bp, synthetic construct
  source 1..50: mol_type = other DNA
aacgccgccttcatggcctcgatcgctagtgcaccagatgaggctgcggc

SEQ ID NO: 65407 - DNA, 50 bp, synthetic construct
  source 1..50: mol_type = other DNA
ttatccaataactcataaatatcattcgattcttctatttagttttttct

SEQ ID NO: 65408 - DNA, 50 bp, synthetic construct
  source 1..50: mol_type = other DNA
gcttgaatggcattcaagaggtcagctgacctcttgaatgccattcaagc

SEQ ID NO: 65409 - DNA, 50 bp, synthetic construct
  source 1..50: mol_type = other DNA
gtaaagatgtcatggacggcagctttttcagtactctatcccatttttaa

SEQ ID NO: 65410 - DNA, 50 bp, synthetic construct
  source 1..50: mol_type = other DNA
atatatccctcttttttaaccaattatctgcgaaaaaaagtgagtaagtt

SEQ ID NO: 65411 - DNA, 50 bp, synthetic construct
  source 1..50: mol_type = other DNA
aaatcagtatagagtttggattattaacatttcaaacgctcacattcttt

SEQ ID NO: 65412 - DNA, 50 bp, synthetic construct
  source 1..50: mol_type = other DNA
aaacactctgagcttaacaaaaaaatttacgttttaagctgattgctttc

SEQ ID NO: 65413 - DNA, 50 bp, synthetic construct
  source 1..50: mol_type = other DNA
aggcttataagaaaaaatcatgtgcttgagaaatatttttaaattcaaga

SEQ ID NO: 65414 - DNA, 50 bp, synthetic construct
  source 1..50: mol_type = other DNA
cattgatacatctcctttcgctattaaaagctaaataagctggatcaacc

SEQ ID NO: 65415 - DNA, 50 bp, synthetic construct
  source 1..50: mol_type = other DNA
tgagtgttgtatcaggatcaaagatttcttgtaagctgatggacgatggt

SEQ ID NO: 65416 - DNA, 50 bp, synthetic construct
  source 1..50: mol_type = other DNA
ctgttgtaaggtttcttcccgcctgcaggcgcgcggcgtcaaccgggtga

SEQ ID NO: 65417 - DNA, 50 bp, synthetic construct
  source 1..50: mol_type = other DNA
ttgtttgtataagcataacatacttgagtgtgtgacgcttattacaacat

SEQ ID NO: 65418 - DNA, 50 bp, synthetic construct
  source 1..50: mol_type = other DNA
ggttttaatgatataatgagattataagctttgatttaattgataaaagt

SEQ ID NO: 65419 - DNA, 50 bp, synthetic construct
  source 1..50: mol_type = other DNA
tgattcgtagtcaaacgctctatccagatcagccacatgcgaaataataa

SEQ ID NO: 65420 - DNA, 50 bp, synthetic construct
  source 1..50: mol_type = other DNA
aacgatactaaaattcttgattttctatcgctaagacctttagtagttgg

SEQ ID NO: 65421 - DNA, 50 bp, synthetic construct
  source 1..50: mol_type = other DNA
tgattatggtaataatatctattttgtaatagaaaatatcgtcataaccg

SEQ ID NO: 65422 - DNA, 50 bp, synthetic construct
  source 1..50: mol_type = other DNA
tatgaacgaccgttgccattccccaatgtgataggcataacagctgctgc

SEQ ID NO: 65423 - DNA, 50 bp, synthetic construct
  source 1..50: mol_type = other DNA
ctgcgcagggtcgccgggtatgcccggcaggcaccggctggtctgcgggg

SEQ ID NO: 65424 - DNA, 50 bp, synthetic construct
  source 1..50: mol_type = other DNA
tcaagccatcagatggcgcatagcaccaacaccgccagaagcattggcga

SEQ ID NO: 65425 - DNA, 50 bp, synthetic construct
  source 1..50: mol_type = other DNA
attgctacttcccggataaaggaatactgccttatgccctgtccgcacct

SEQ ID NO: 65426 - DNA, 50 bp, synthetic construct
  source 1..50: mol_type = other DNA
tatcaccacctcgcattgttgcgcccgcgctcttgggccggacgctgaag

SEQ ID NO: 65427 - DNA, 50 bp, synthetic construct
  source 1..50: mol_type = other DNA
tttatttctggctatgatgaacggactttatcaccatagcataacttaaa

SEQ ID NO: 65428 - DNA, 50 bp, synthetic construct
  source 1..50: mol_type = other DNA
ttcggagattatttgaaaactacctcagttcttcgaaaatatatcccatc

SEQ ID NO: 65429 - DNA, 50 bp, synthetic construct
  source 1..50: mol_type = other DNA
gtaaatgccaataatacccacagaaatctgtgctgtttaatgctatacat

SEQ ID NO: 65430 - DNA, 50 bp, synthetic construct
  source 1..50: mol_type = other DNA
cgtatcagaagaaatcagtagtaagttgcccggaaagcaactctgatacc

SEQ ID NO: 65431 - DNA, 50 bp, synthetic construct
  source 1..50: mol_type = other DNA
atcagcttcaaccggcagttgggtactgccaaagcttctgatgtacttat

SEQ ID NO: 65432 - DNA, 50 bp, synthetic construct
  source 1..50: mol_type = other DNA
atgttcattttggaggtaacgctgatgagtgtgacccgaaaggatatcat

SEQ ID NO: 65433 - DNA, 50 bp, synthetic construct
  source 1..50: mol_type = other DNA
tgatcttcttctttgattctattgatataccgatatcggtaactatatgg

SEQ ID NO: 65434 - DNA, 50 bp, synthetic construct
  source 1..50: mol_type = other DNA
ttttcgcactctgctgggtgaaaacgatcgcatccagcagcgtttgaaaa

SEQ ID NO: 65435 - DNA, 50 bp, synthetic construct
  source 1..50: mol_type = other DNA
taattcgtagtagcttaactatccgttaatacataaaccaagaaaaatta

SEQ ID NO: 65436 - DNA, 50 bp, synthetic construct
  source 1..50: mol_type = other DNA
acagggcgtagtcggtgggcatagcggtatgccgagccgctgcatgccgt

SEQ ID NO: 65437 - DNA, 50 bp, synthetic construct
  source 1..50: mol_type = other DNA
tttttctacatacaaatatcgcaaaactaatatatcacaattgttaaaaa

SEQ ID NO: 65438 - DNA, 50 bp, synthetic construct
  source 1..50: mol_type = other DNA
aggaggagcagctggtgctggagatctgacgagaacgccaggctggtcca

SEQ ID NO: 65439 - DNA, 50 bp, synthetic construct
  source 1..50: mol_type = other DNA
tagccctgtgccatgtagctgttggccaaaggccccatccccgagggggc

SEQ ID NO: 65440 - DNA, 50 bp, synthetic construct
  source 1..50: mol_type = other DNA
acataatgcagttcctatgatcataggtgaaaaactttctagcatatcca

SEQ ID NO: 65441 - DNA, 50 bp, synthetic construct
  source 1..50: mol_type = other DNA
gcaaatgaccctaattgtgatacaaatgaagaaatcgcagaccgttttga

SEQ ID NO: 65442 - DNA, 50 bp, synthetic construct
  source 1..50: mol_type = other DNA
aaccgaaaattttacatagcattgtcactgcccaaaaagtgaggtgagtt

SEQ ID NO: 65443 - DNA, 50 bp, synthetic construct
  source 1..50: mol_type = other DNA
aattctgtcttgattttgtatcattaatttattaaaaacaaatttgaaag

SEQ ID NO: 65444 - DNA, 50 bp, synthetic construct
  source 1..50: mol_type = other DNA
ggaacccgcttttcaggcggaaatatgtctacgccgaggatgcgggggcc

SEQ ID NO: 65445 - DNA, 50 bp, synthetic construct
  source 1..50: mol_type = other DNA
ccccatacaacaaggatgactccggcctccaaaatctggctgggcgtccc

SEQ ID NO: 65446 - DNA, 50 bp, synthetic construct
  source 1..50: mol_type = other DNA
gctagggaaatgaagaatccactggccagtcatatctttttctatgcctc

SEQ ID NO: 65447 - DNA, 50 bp, synthetic construct
  source 1..50: mol_type = other DNA
ataaaaatgcccggtaatatcgttgcgtgttttattgatcgtattttgac

SEQ ID NO: 65448 - DNA, 50 bp, synthetic construct
  source 1..50: mol_type = other DNA
tgcaatataatagcatagataatagtattatagcagtcaattatatgcta

SEQ ID NO: 65449 - DNA, 50 bp, synthetic construct
  source 1..50: mol_type = other DNA
ctgttgtgtttcgcggcggtgagccggctcaccgtcggcctgcgcggtgt

SEQ ID NO: 65450 - DNA, 50 bp, synthetic construct
  source 1..50: mol_type = other DNA
aatttttcttcataactacttaaaaatttaaatattttcacagaaaaata

SEQ ID NO: 65451 - DNA, 50 bp, synthetic construct
  source 1..50: mol_type = other DNA
gtgactggaagattgttaaagccttagggctttttgttatttatagagta

SEQ ID NO: 65452 - DNA, 50 bp, synthetic construct
  source 1..50: mol_type = other DNA
tcctttccatgtggcttttgcttatcagtccaccgcgctcatggaaagtg

SEQ ID NO: 65453 - DNA, 50 bp, synthetic construct
  source 1..50: mol_type = other DNA
agatgcagtatttactcatgttgcatctcgcaggagtacggcgtgcctct

SEQ ID NO: 65454 - DNA, 50 bp, synthetic construct
  source 1..50: mol_type = other DNA
ctaaaaataatatttgaaaccgaccggataatcgcaaatgaaagggagag

SEQ ID NO: 65455 - DNA, 50 bp, synthetic construct
  source 1..50: mol_type = other DNA
atcctttgattttaaacaatatgtggtgtcaatttttatagataaatttg

SEQ ID NO: 65456 - DNA, 50 bp, synthetic construct
  source 1..50: mol_type = other DNA
gcgcggcgaaccatctttctggtagcgcgcttgaatggggttcaagaggc

SEQ ID NO: 65457 - DNA, 50 bp, synthetic construct
  source 1..50: mol_type = other DNA
atagtaaaactaaccataaaatgcgcacattttaaaaatcatagcacacc

SEQ ID NO: 65458 - DNA, 50 bp, synthetic construct
  source 1..50: mol_type = other DNA
ggaacgtccgaccaaaaatccacggacgtggatgttcttcctgacgtatg

SEQ ID NO: 65459 - DNA, 50 bp, synthetic construct
  source 1..50: mol_type = other DNA
gtagattttttataatctgttttgtacaaaataaatgatacaatattctc

SEQ ID NO: 65460 - DNA, 50 bp, synthetic construct
  source 1..50: mol_type = other DNA
gagtctttaaaagaagaagccattataccataaaagacttgatatatatc

SEQ ID NO: 65461 - DNA, 50 bp, synthetic construct
  source 1..50: mol_type = other DNA
aaattcttccactcctttctctttggaaaatgaacagcgtgttgccgtat

SEQ ID NO: 65462 - DNA, 50 bp, synthetic construct
  source 1..50: mol_type = other DNA
catcacccagaacaggcagttgctctgaatgtgtgcaaaaaagaaaccgg

SEQ ID NO: 65463 - DNA, 50 bp, synthetic construct
  source 1..50: mol_type = other DNA
ggaagtatttttgtttcatgtgtggatacataggaaacaaaaagaaaaga

SEQ ID NO: 65464 - DNA, 50 bp, synthetic construct
  source 1..50: mol_type = other DNA
cactggaacaccgcaatgctcggcgattagagaattgtcaataagaagtg

SEQ ID NO: 65465 - DNA, 50 bp, synthetic construct
  source 1..50: mol_type = other DNA
ggccggttgcttctctgtatcccgatactgccaaggaggtgcaaccatga

SEQ ID NO: 65466 - DNA, 50 bp, synthetic construct
  source 1..50: mol_type = other DNA
gacctccaaacaaaaaaaggcccgcgccggggcttttttgcgcccttttt

SEQ ID NO: 65467 - DNA, 50 bp, synthetic construct
  source 1..50: mol_type = other DNA
ctgaatgtattttagtcgtttccagaagataacgaattaaataccaacag

SEQ ID NO: 65468 - DNA, 50 bp, synthetic construct
  source 1..50: mol_type = other DNA
tctcaaatctcaattatcagaaactaatattaaatgtaacagatatgaga

SEQ ID NO: 65469 - DNA, 50 bp, synthetic construct
  source 1..50: mol_type = other DNA
cgttcgccctgctggggcttgctgttcagcaagcattgtgtcaagaatcg

SEQ ID NO: 65470 - DNA, 50 bp, synthetic construct
  source 1..50: mol_type = other DNA
cgggaaaggatgtgaatacatgggacaccactgttgcacatgcagtctat

SEQ ID NO: 65471 - DNA, 50 bp, synthetic construct
  source 1..50: mol_type = other DNA
cagtttccgcgtctgcggcccgcagccgccggggccagatggggaatctg

SEQ ID NO: 65472 - DNA, 50 bp, synthetic construct
  source 1..50: mol_type = other DNA
ttctttcttcaatttatatatcacctttgtgttataaatgaaattatagg

SEQ ID NO: 65473 - DNA, 50 bp, synthetic construct
  source 1..50: mol_type = other DNA
ttccatatacatattttgaaccgtttatactcatttttacgtatattgaa

SEQ ID NO: 65474 - DNA, 50 bp, synthetic construct
  source 1..50: mol_type = other DNA
tgcaaattattgataatttatcagatcaataaaatgatagatatcttgct

SEQ ID NO: 65475 - DNA, 50 bp, synthetic construct
  source 1..50: mol_type = other DNA
actatatatcactctgtttgatacaattatcggacagaaattctccctca

SEQ ID NO: 65476 - DNA, 50 bp, synthetic construct
  source 1..50: mol_type = other DNA
ggccagccctttgagctgatcggcgaaccgaatacagcaaaaggcccaga

SEQ ID NO: 65477 - DNA, 50 bp, synthetic construct
  source 1..50: mol_type = other DNA
caagcggtagctgcacaaaaaaaggactgatttttttatgctaaaaaccg

SEQ ID NO: 65478 - DNA, 50 bp, synthetic construct
  source 1..50: mol_type = other DNA
catggtaaaacaacctttttaaacgcaatagaaaagtctggattatcaag

SEQ ID NO: 65479 - DNA, 50 bp, synthetic construct
  source 1..50: mol_type = other DNA
ttttaaataattatatgtattatattgataccttctccaaaaatttcaat

SEQ ID NO: 65480 - DNA, 50 bp, synthetic construct
  source 1..50: mol_type = other DNA
tcggcggcattaaaaacatcagcacttgctgccattcctgccgcagcctt

SEQ ID NO: 65481 - DNA, 50 bp, synthetic construct
  source 1..50: mol_type = other DNA
tgtcagccttctggtcttcaatcataaatatctgttccacaatttttctc

SEQ ID NO: 65482 - DNA, 50 bp, synthetic construct
  source 1..50: mol_type = other DNA
tagaattacatatggatagtggtgttttttaagacatcaatgctatgatc

SEQ ID NO: 65483 - DNA, 50 bp, synthetic construct
  source 1..50: mol_type = other DNA
cgtttacattggtatcgagcggcagaatccgctcaacatcaatggaaacg

SEQ ID NO: 65484 - DNA, 50 bp, synthetic construct
  source 1..50: mol_type = other DNA
tcggtaaacgagctgtttgatcttttcagggattcgtagaattataccga

SEQ ID NO: 65485 - DNA, 50 bp, synthetic construct
  source 1..50: mol_type = other DNA
atggctcggtttgtggcaccgcccatggtcggtggagttgtccgctccga

SEQ ID NO: 65486 - DNA, 50 bp, synthetic construct
  source 1..50: mol_type = other DNA
catttacgcctaacctccctccggcaagattagggggttcaaatcccctc

SEQ ID NO: 65487 - DNA, 50 bp, synthetic construct
  source 1..50: mol_type = other DNA
attaatattttttttctcataaatttaattatgaaagtaaaagtaatttt

SEQ ID NO: 65488 - DNA, 50 bp, synthetic construct
  source 1..50: mol_type = other DNA
acaatattatactgtattttatatttatataataaccttataaatatttt

SEQ ID NO: 65489 - DNA, 50 bp, synthetic construct
  source 1..50: mol_type = other DNA
gtcattggcgaaaacgaaagcaacaggtttctttcgttttatgtttagga

SEQ ID NO: 65490 - DNA, 50 bp, synthetic construct
  source 1..50: mol_type = other DNA
tatgaataaaaatatgaacaatattaggtttgttcatatttaagtttata

SEQ ID NO: 65491 - DNA, 50 bp, synthetic construct
  source 1..50: mol_type = other DNA
ccagacccttggcggcctgaatggtctgaaaaacaccgtatccgaggtgc

SEQ ID NO: 65492 - DNA, 50 bp, synthetic construct
  source 1..50: mol_type = other DNA
tttgtagcaaaggtgtcaagtcacaaatgacttgaaatatttatatataa

SEQ ID NO: 65493 - DNA, 50 bp, synthetic construct
  source 1..50: mol_type = other DNA
tcaggaatctgaatcgtgtattgaaaagaatatggagttttgtctgattt

SEQ ID NO: 65494 - DNA, 50 bp, synthetic construct
  source 1..50: mol_type = other DNA
atatatgataatattaaagagaatatattattgaaaagattgaggtatat

SEQ ID NO: 65495 - DNA, 50 bp, synthetic construct
  source 1..50: mol_type = other DNA
tctgacgggcggtaatcctcccgtcagcggcaagaacacagaccgcccga

SEQ ID NO: 65496 - DNA, 50 bp, synthetic construct
  source 1..50: mol_type = other DNA
ctgaaatgactgatttcttaaatgaaattataagcaattttcatataatg

SEQ ID NO: 65497 - DNA, 50 bp, synthetic construct
  source 1..50: mol_type = other DNA
caatatagatgattataaagctaagacttattacacctttaaatatattt

SEQ ID NO: 65498 - DNA, 50 bp, synthetic construct
  source 1..50: mol_type = other DNA
agcacaatccaactcctgcaaaacaggttttggagatgaagatactgctg

SEQ ID NO: 65499 - DNA, 50 bp, synthetic construct
  source 1..50: mol_type = other DNA
aaaatctgcactgctgaaaattgcactcatcgttttaaatatctgatttt

SEQ ID NO: 65500 - DNA, 50 bp, synthetic construct
  source 1..50: mol_type = other DNA
tggacatattcccgtactaatcgatatattttagtaccggaaaaacacca

SEQ ID NO: 65501 - DNA, 50 bp, synthetic construct
  source 1..50: mol_type = other DNA
tgaagctgctgcttatgcaggcggtgccgttttctgcggcagcagctttc

SEQ ID NO: 65502 - DNA, 50 bp, synthetic construct
  source 1..50: mol_type = other DNA
atgtggagtgagaaagaaatgttatatgaggggtatttgttttcacacat

SEQ ID NO: 65503 - DNA, 50 bp, synthetic construct
  source 1..50: mol_type = other DNA
gttgggatttgtaggaatatatatttgtatatattccttaaaaataggac

SEQ ID NO: 65504 - DNA, 50 bp, synthetic construct
  source 1..50: mol_type = other DNA
ctccgatagcatctgcacaagcgttgacgctgcgtcaactgctatgctgt

SEQ ID NO: 65505 - DNA, 50 bp, synthetic construct
  source 1..50: mol_type = other DNA
cacatcgacgccgcgcttggccgccaccggccgcgcaggtactcgagtgc

SEQ ID NO: 65506 - DNA, 50 bp, synthetic construct
  source 1..50: mol_type = other DNA
gtataaaaaatacacctgtacaggtggccggaattcggtatttactatgg

SEQ ID NO: 65507 - DNA, 50 bp, synthetic construct
  source 1..50: mol_type = other DNA
tttcatgccgtcacgctcctttcaatgtccagcaggctgacgaaatcctc

SEQ ID NO: 65508 - DNA, 50 bp, synthetic construct
  source 1..50: mol_type = other DNA
cacaaaccttgatttttcaaggattccccacgggaaaagcatcgttctct

SEQ ID NO: 65509 - DNA, 50 bp, synthetic construct
  source 1..50: mol_type = other DNA
ggcggcgccccctgttccagaagccgacatccttaacacgggcagtcggc

SEQ ID NO: 65510 - DNA, 50 bp, synthetic construct
  source 1..50: mol_type = other DNA
tataaccggtgatacgcacggtgattttaccgtggccaacacctccaatg

SEQ ID NO: 65511 - DNA, 50 bp, synthetic construct
  source 1..50: mol_type = other DNA
taaagcttacagaaaagttctttttataatagacttcccaaagcaaggtc

SEQ ID NO: 65512 - DNA, 50 bp, synthetic construct
  source 1..50: mol_type = other DNA
caacttccgacagaaaggaggtgagaccgctttctttgctatacattttt

SEQ ID NO: 65513 - DNA, 50 bp, synthetic construct
  source 1..50: mol_type = other DNA
gaaggtggtgcttatagacggcggcaaggaaagaaagatgaaaggtctgg

SEQ ID NO: 65514 - DNA, 50 bp, synthetic construct
  source 1..50: mol_type = other DNA
ctaaacgggaaagattgataggaaggttcctccagattctttccgtagga

SEQ ID NO: 65515 - DNA, 50 bp, synthetic construct
  source 1..50: mol_type = other DNA
tgtctcctccgttttcttagaacatcttttttaaaaaaactaaggagatg

SEQ ID NO: 65516 - DNA, 50 bp, synthetic construct
  source 1..50: mol_type = other DNA
gccgcttctgttccaggtttcctagatgagctgtgttgatcagttcgtgc

SEQ ID NO: 65517 - DNA, 50 bp, synthetic construct
  source 1..50: mol_type = other DNA
accgggcactcggcggcagtacataccgatattggtaccgaagaaccggt

SEQ ID NO: 65518 - DNA, 50 bp, synthetic construct
  source 1..50: mol_type = other DNA
gaaatggacacacggaaaacataaaataatggttagaatgtgtcgtatgt

SEQ ID NO: 65519 - DNA, 50 bp, synthetic construct
  source 1..50: mol_type = other DNA
ctacgaagatattgctttgttctctggaacggaaagcaaattctgtttgc

SEQ ID NO: 65520 - DNA, 50 bp, synthetic construct
  source 1..50: mol_type = other DNA
gaagaaatagtattaaaatgtgtatataaaattttttctcaaattgatta

SEQ ID NO: 65521 - DNA, 50 bp, synthetic construct
  source 1..50: mol_type = other DNA
aataaactaaatctattgacatattaataggagaaagaaattaaacttta

SEQ ID NO: 65522 - DNA, 50 bp, synthetic construct
  source 1..50: mol_type = other DNA
gaaatagttgagttaaaagaaatatatatggctttgtacggtaacatgtg

SEQ ID NO: 65523 - DNA, 50 bp, synthetic construct
  source 1..50: mol_type = other DNA
agaaaatgttgaaaaaatgaagtgtaaacttattttagagagatcattca

SEQ ID NO: 65524 - DNA, 50 bp, synthetic construct
  source 1..50: mol_type = other DNA
gtcgatgaaccgactgtcgagcagatagggcagataaaacatttattgat

SEQ ID NO: 65525 - DNA, 50 bp, synthetic construct
  source 1..50: mol_type = other DNA
gtgtaactgtgtcaggattgaaaatatgttagaagtagagaatccaggtt

SEQ ID NO: 65526 - DNA, 50 bp, synthetic construct
  source 1..50: mol_type = other DNA
atagaaagtgatataaggagtgatatgttcccccatatatcagtttctta

SEQ ID NO: 65527 - DNA, 50 bp, synthetic construct
  source 1..50: mol_type = other DNA
aaaacaggctgaggtagtcataaagcttctgtaaggaagatggcagtatt

SEQ ID NO: 65528 - DNA, 50 bp, synthetic construct
  source 1..50: mol_type = other DNA
ctttctaatgttaatcatgaattgtacaattctatcaattgaatgaaaac

SEQ ID NO: 65529 - DNA, 50 bp, synthetic construct
  source 1..50: mol_type = other DNA
cgctcaacggtcgggcagcctccagccgcgcatgcgccggatcagcatcg

SEQ ID NO: 65530 - DNA, 50 bp, synthetic construct
  source 1..50: mol_type = other DNA
gaaaaatccactggcagggcttgtgaacataaaatgtagatggaggtgtc

SEQ ID NO: 65531 - DNA, 50 bp, synthetic construct
  source 1..50: mol_type = other DNA
aaattgtagtcttgaatgaagacattcgttaaaataaaaattgataatga

SEQ ID NO: 65532 - DNA, 50 bp, synthetic construct
  source 1..50: mol_type = other DNA
tccggagaaaatgtttcccggttcagaaactggcggtctgtttctttctc

SEQ ID NO: 65533 - DNA, 50 bp, synthetic construct
  source 1..50: mol_type = other DNA
atccgaagatagctagtattaactggcatccgtaatcatgcacttgccct

SEQ ID NO: 65534 - DNA, 50 bp, synthetic construct
  source 1..50: mol_type = other DNA
taccccaaaatccaataaaaaaacttattttttggttgatagttgcttac

SEQ ID NO: 65535 - DNA, 50 bp, synthetic construct
  source 1..50: mol_type = other DNA
ttcagtaatcacacaatatcacacaagaatgatatgttctgattgtataa

SEQ ID NO: 65536 - DNA, 50 bp, synthetic construct
  source 1..50: mol_type = other DNA
cagcaaataatcgatacattcagtcctgagaatagttcgtttacttgctt

SEQ ID NO: 65537 - DNA, 50 bp, synthetic construct
  source 1..50: mol_type = other DNA
tttttctacatacaaatatcgcaaaagtaatatatcacaattgttaaaaa

SEQ ID NO: 65538 - DNA, 50 bp, synthetic construct
  source 1..50: mol_type = other DNA
ctttgcttacaaccttagaaaaattattttgtaaaaatttacccgccaag

SEQ ID NO: 65539 - DNA, 50 bp, synthetic construct
  source 1..50: mol_type = other DNA
gaaaatctattttgctaaaaaatgaagattagttcatcaagtacattcct

SEQ ID NO: 65540 - DNA, 50 bp, synthetic construct
  source 1..50: mol_type = other DNA
gagcttagatttaatttaggagcttccaaaggtaaaaaaaatatatgaag

SEQ ID NO: 65541 - DNA, 50 bp, synthetic construct
  source 1..50: mol_type = other DNA
aattttcatgtagttgttgtagtcattactacaaactgaaaatgacagtt

SEQ ID NO: 65542 - DNA, 50 bp, synthetic construct
  source 1..50: mol_type = other DNA
tgcacttgtaaactttgcggaatgtttgtattgccgatttcacttgttac

SEQ ID NO: 65543 - DNA, 50 bp, synthetic construct
  source 1..50: mol_type = other DNA
cccttaccgcgcaaagggcgtgaatatctacagcttttcgacccgcagga

SEQ ID NO: 65544 - DNA, 50 bp, synthetic construct
  source 1..50: mol_type = other DNA
atttattttctcttttttctatttcataatcgaaaataggtgctttttat

SEQ ID NO: 65545 - DNA, 50 bp, synthetic construct
  source 1..50: mol_type = other DNA
tcacctctttatatggcatggtatacacaccattaattctaaagaccttt

SEQ ID NO: 65546 - DNA, 50 bp, synthetic construct
  source 1..50: mol_type = other DNA
gcagccgctaaaggtatgtcttattccccttgttcgcttttctcctctgc

SEQ ID NO: 65547 - DNA, 50 bp, synthetic construct
  source 1..50: mol_type = other DNA
ggcacacataccacttgggtataaaataatcaaacagctatagttatgct

SEQ ID NO: 65548 - DNA, 50 bp, synthetic construct
  source 1..50: mol_type = other DNA
cattgaccaaaggatggcagaacttcaagcctgcagaacttacctttgct

SEQ ID NO: 65549 - DNA, 50 bp, synthetic construct
  source 1..50: mol_type = other DNA
atattgaaaaactcctttcaaacttgttataactttaactttttccgtaa

SEQ ID NO: 65550 - DNA, 50 bp, synthetic construct
  source 1..50: mol_type = other DNA
agattatacaaagatggtactgaaaaatacaattaaagaatctataataa

SEQ ID NO: 65551 - DNA, 50 bp, synthetic construct
  source 1..50: mol_type = other DNA
cagcctgcgcagacatccgggaaaggtctccctttcttctaagcagggct

SEQ ID NO: 65552 - DNA, 50 bp, synthetic construct
  source 1..50: mol_type = other DNA
ttgtgacgattgcctctgaatgtgatcaacccgagggctgatgtagtaaa

SEQ ID NO: 65553 - DNA, 50 bp, synthetic construct
  source 1..50: mol_type = other DNA
tcttatgtcgtattatggcaaaaaagagaggactgatttatatggcaaga

SEQ ID NO: 65554 - DNA, 50 bp, synthetic construct
  source 1..50: mol_type = other DNA
cttttcttctgttttgggcataaaaatatataaccaaggcacagctctgg

SEQ ID NO: 65555 - DNA, 50 bp, synthetic construct
  source 1..50: mol_type = other DNA
atcccggaagccgtacttggcgatgaatcgccaaaatcgctggataataa

SEQ ID NO: 65556 - DNA, 50 bp, synthetic construct
  source 1..50: mol_type = other DNA
cccacgcccagctccagatacaggatccagaaccaagagctggacgccgg

SEQ ID NO: 65557 - DNA, 50 bp, synthetic construct
  source 1..50: mol_type = other DNA
ccagtggcaaagaaacgtgtggccgccaccatcgagcaggatgccaatga

SEQ ID NO: 65558 - DNA, 50 bp, synthetic construct
  source 1..50: mol_type = other DNA
cttgccacggcaagcagggactttgcaaagaacctccgtgccaaggagaa

SEQ ID NO: 65559 - DNA, 50 bp, synthetic construct
  source 1..50: mol_type = other DNA
acggcttcaagcccgcccaccgcaagtgctttgaaagaacgctccaccgt

SEQ ID NO: 65560 - DNA, 50 bp, synthetic construct
  source 1..50: mol_type = other DNA
agccaaagtgttcgattttattctcgagaaacaacaggaaaatgatagct

SEQ ID NO: 65561 - DNA, 50 bp, synthetic construct
  source 1..50: mol_type = other DNA
attcctgttctcatcccatatccgttcgtatatgttactgttacagtctg

SEQ ID NO: 65562 - DNA, 50 bp, synthetic construct
  source 1..50: mol_type = other DNA
gcagatttttttattatttttgcggcaaaaacaaaaagccgcttacctca

SEQ ID NO: 65563 - DNA, 50 bp, synthetic construct
  source 1..50: mol_type = other DNA
cgaaagcgacatcgagtggctgcgggtcaacgaaaccggccagcacatcg

SEQ ID NO: 65564 - DNA, 50 bp, synthetic construct
  source 1..50: mol_type = other DNA
aaaacttgtcggtgaattaaaccagatggtttaaatgcaaacacagttta

SEQ ID NO: 65565 - DNA, 50 bp, synthetic construct
  source 1..50: mol_type = other DNA
atacttatgatgtcagtttatgtatttaccgatatccgcttgataaagct

SEQ ID NO: 65566 - DNA, 50 bp, synthetic construct
  source 1..50: mol_type = other DNA
tgatttgacacatattataatagaagaattttattaaatatgtcaataca

SEQ ID NO: 65567 - DNA, 50 bp, synthetic construct
  source 1..50: mol_type = other DNA
ccgcaagcgcaagaacgagctgaccgaacagctgatagccatcgttgctg

SEQ ID NO: 65568 - DNA, 50 bp, synthetic construct
  source 1..50: mol_type = other DNA
cggatagcaacggtattccagggcatcagtaggtctagggttcgaatccc

SEQ ID NO: 65569 - DNA, 50 bp, synthetic construct
  source 1..50: mol_type = other DNA
atcattcctttcttaaaatatttttgaggcaattgctgtaaaataatgtg

SEQ ID NO: 65570 - DNA, 50 bp, synthetic construct
  source 1..50: mol_type = other DNA
tggtaatggccattgaaatttactaaaatatggctctgttggaataacct

SEQ ID NO: 65571 - DNA, 50 bp, synthetic construct
  source 1..50: mol_type = other DNA
aatcttctctgataaattccatattgggctgtatttttgatcccgcaata

SEQ ID NO: 65572 - DNA, 50 bp, synthetic construct
  source 1..50: mol_type = other DNA
acatcgttatatacacaaggtatgtacatcatcggtgtgtttgataatca

SEQ ID NO: 65573 - DNA, 50 bp, synthetic construct
  source 1..50: mol_type = other DNA
cagtaccagcccgatggccgatgcggaaatcggccccaccgttaccgtct

SEQ ID NO: 65574 - DNA, 50 bp, synthetic construct
  source 1..50: mol_type = other DNA
aaaattaaacaataccggctctgcatttttggcattacctttttaataat

SEQ ID NO: 65575 - DNA, 50 bp, synthetic construct
  source 1..50: mol_type = other DNA
acttgttgaataacggagaaaataattactttctatcttttcccgcaagt

SEQ ID NO: 65576 - DNA, 50 bp, synthetic construct
  source 1..50: mol_type = other DNA
ctgtgccgatatctgtcaatgttcctgtgaatttgcaaatatagacagcg

SEQ ID NO: 65577 - DNA, 50 bp, synthetic construct
  source 1..50: mol_type = other DNA
gctgcagaaccctcatgctttgcatattaaaagcattggatgtctgatac

SEQ ID NO: 65578 - DNA, 50 bp, synthetic construct
  source 1..50: mol_type = other DNA
aagacctgcggctggtcgtgattgatatgacaatacccttaatgggtgtt

SEQ ID NO: 65579 - DNA, 50 bp, synthetic construct
  source 1..50: mol_type = other DNA
ctcatttaatcttcttactattgtttacaagcagctaaagaagaattaaa

SEQ ID NO: 65580 - DNA, 50 bp, synthetic construct
  source 1..50: mol_type = other DNA
cgggctttttttatgttatataatgaatacaataacaataaattcctgtt

SEQ ID NO: 65581 - DNA, 50 bp, synthetic construct
  source 1..50: mol_type = other DNA
cgttctttcgctcgttgcatcttctagaagatgaagctaattaaataatg

SEQ ID NO: 65582 - DNA, 50 bp, synthetic construct
  source 1..50: mol_type = other DNA
gaaacaaaaaaggcggaaggggaaatttgttcttttccaattcttacaat

SEQ ID NO: 65583 - DNA, 50 bp, synthetic construct
  source 1..50: mol_type = other DNA
agcataaaaaaacacagcctttctttagactctttgattttttttataaa

SEQ ID NO: 65584 - DNA, 50 bp, synthetic construct
  source 1..50: mol_type = other DNA
gtcggtaaaattgccgatgaagttttggctgtgtcggcatgattaaagca

SEQ ID NO: 65585 - DNA, 50 bp, synthetic construct
  source 1..50: mol_type = other DNA
acagcaaaggcatttgccaatcggatccgtgcggcaagacggtttcggat

SEQ ID NO: 65586 - DNA, 50 bp, synthetic construct
  source 1..50: mol_type = other DNA
tgactaaaaacataaaattcaaacatgtgtggattttattctccgtggca

SEQ ID NO: 65587 - DNA, 50 bp, synthetic construct
  source 1..50: mol_type = other DNA
aagttgctcattatctatatctttcaatgattatggaagatgaaataatt

SEQ ID NO: 65588 - DNA, 50 bp, synthetic construct
  source 1..50: mol_type = other DNA
tacgagttcaattccacgcgcccgaccggacgctcggaattctgctttgc

SEQ ID NO: 65589 - DNA, 50 bp, synthetic construct
  source 1..50: mol_type = other DNA
cggcgtgttccggcgcgccgtcgtcatcgaaaggaggccggcacatgaga

SEQ ID NO: 65590 - DNA, 50 bp, synthetic construct
  source 1..50: mol_type = other DNA
agtgactacgatgatcgtccggtagctgtgggtctagggttcgaatccct

SEQ ID NO: 65591 - DNA, 50 bp, synthetic construct
  source 1..50: mol_type = other DNA
tacccttgctcgtacatacgaattataattcttcagccttaaaggtagta

SEQ ID NO: 65592 - DNA, 50 bp, synthetic construct
  source 1..50: mol_type = other DNA
gctgttttcattatatcacagaaagaagtacaggaacaattgaaaaccgc

SEQ ID NO: 65593 - DNA, 50 bp, synthetic construct
  source 1..50: mol_type = other DNA
taatagtttgtaatatactcataaaaataaaattatatggtaaaatataa

SEQ ID NO: 65594 - DNA, 50 bp, synthetic construct
  source 1..50: mol_type = other DNA
gcggctgccattcttgaatatttctagaaatggagtcaaaaacatttcgt

SEQ ID NO: 65595 - DNA, 50 bp, synthetic construct
  source 1..50: mol_type = other DNA
tttatcaaagaggctgattcatggtatgatttgtcagggcgtcggagaaa

SEQ ID NO: 65596 - DNA, 50 bp, synthetic construct
  source 1..50: mol_type = other DNA
catagcatattttctgaaaaaagtcaaaattttctttaagatatgccata

SEQ ID NO: 65597 - DNA, 50 bp, synthetic construct
  source 1..50: mol_type = other DNA
atgcgtcaggcggaccataaatccaacgatactgagtctaggcagtatcg

SEQ ID NO: 65598 - DNA, 50 bp, synthetic construct
  source 1..50: mol_type = other DNA
taaatgagggcctattgaaaatgtattcagagctaatatgtgacactaac

SEQ ID NO: 65599 - DNA, 50 bp, synthetic construct
  source 1..50: mol_type = other DNA
aaacttctttttttatgtaccataataatgggaaatgtaatgttaattcc

SEQ ID NO: 65600 - DNA, 50 bp, synthetic construct
  source 1..50: mol_type = other DNA
acaccccgccgaacacggggtcggaacagacctcgcagatgttattgtac

SEQ ID NO: 65601 - DNA, 50 bp, synthetic construct
  source 1..50: mol_type = other DNA
aagttgcgattgacggccataatgttttttatgtttaacaataacactaa

SEQ ID NO: 65602 - DNA, 50 bp, synthetic construct
  source 1..50: mol_type = other DNA
acgctctggacgctgaggacaaggcgactcctcagcagctcacagagcgc

SEQ ID NO: 65603 - DNA, 50 bp, synthetic construct
  source 1..50: mol_type = other DNA
gattataagattttttttgcggtttgctgcgcaaaagtgatattatattc

SEQ ID NO: 65604 - DNA, 50 bp, synthetic construct
  source 1..50: mol_type = other DNA
aatcatgtccaaactctaaaatgaaatccttctcgggcaaggacaattgc

SEQ ID NO: 65605 - DNA, 50 bp, synthetic construct
  source 1..50: mol_type = other DNA
tccttcccccgtgcccgaatcgggcaggccatgtacttgcggaaaaaggc

SEQ ID NO: 65606 - DNA, 50 bp, synthetic construct
  source 1..50: mol_type = other DNA
agcatttccaatgaaagtacacaaattcgtttcctttcaatagaagccat

SEQ ID NO: 65607 - DNA, 50 bp, synthetic construct
  source 1..50: mol_type = other DNA
tctacctccataatttttacaatttttctaataaaacaacacagtaagat

SEQ ID NO: 65608 - DNA, 50 bp, synthetic construct
  source 1..50: mol_type = other DNA
aacaacattccctccgcgtcacgccgggtgaacgcgctgtccttgttgta

SEQ ID NO: 65609 - DNA, 50 bp, synthetic construct
  source 1..50: mol_type = other DNA
ttgcttgctctattttattttccatttattaaagaaaatggaggtttttt

SEQ ID NO: 65610 - DNA, 50 bp, synthetic construct
  source 1..50: mol_type = other DNA
tatatcctcctttatgatcctgtggccacattatcaagaactatgaaaac

SEQ ID NO: 65611 - DNA, 50 bp, synthetic construct
  source 1..50: mol_type = other DNA
ctcccatccgtcattgaggactatttgcagatgagccgaccggaggggtt

SEQ ID NO: 65612 - DNA, 50 bp, synthetic construct
  source 1..50: mol_type = other DNA
ttggcgcgcggcgcctccttgtaagcgtagaagtccgcgccaacaccaaa

SEQ ID NO: 65613 - DNA, 50 bp, synthetic construct
  source 1..50: mol_type = other DNA
tgttaaaaaatgttaaaatgagtacaaaccaattttaacgatttatagga

SEQ ID NO: 65614 - DNA, 50 bp, synthetic construct
  source 1..50: mol_type = other DNA
attctgtttcattttcatcctccgttgcgtacatgaaggacaagacgttt

SEQ ID NO: 65615 - DNA, 50 bp, synthetic construct
  source 1..50: mol_type = other DNA
aggcgaggggatttgggtcattggcgataatgccctgaaaccgttgataa

SEQ ID NO: 65616 - DNA, 50 bp, synthetic construct
  source 1..50: mol_type = other DNA
atataaaaggtgattttgagagtaatttttcatttaataaaattttattc

SEQ ID NO: 65617 - DNA, 50 bp, synthetic construct
  source 1..50: mol_type = other DNA
ggcttcttcttcataacgacgtgcgccgccgggaggacgaccgcgaagcc

SEQ ID NO: 65618 - DNA, 50 bp, synthetic construct
  source 1..50: mol_type = other DNA
ttctattcgattatcaaggttcccaggacgattgaaatgccaaccttgaa

SEQ ID NO: 65619 - DNA, 50 bp, synthetic construct
  source 1..50: mol_type = other DNA
aagaacagttgaacagttttgaaaatagtatttatggtaatttatagctt

SEQ ID NO: 65620 - DNA, 50 bp, synthetic construct
  source 1..50: mol_type = other DNA
tagcttcataattatcttcattaaaagtaatagtaatcaatatatcgagt

SEQ ID NO: 65621 - DNA, 50 bp, synthetic construct
  source 1..50: mol_type = other DNA
acctcctcatcatcacccaagccaaatgatatccgtgagatggagaacat

SEQ ID NO: 65622 - DNA, 50 bp, synthetic construct
  source 1..50: mol_type = other DNA
actgagcctttctttttttcaatggtcaaacaaaaagggtctgttgcagt

SEQ ID NO: 65623 - DNA, 50 bp, synthetic construct
  source 1..50: mol_type = other DNA
ctattaaccaataaaagtgtcttgtacaagacgtttttcccttgaaaaca

SEQ ID NO: 65624 - DNA, 50 bp, synthetic construct
  source 1..50: mol_type = other DNA
agccactaccggtatcaaaaacggaaattttttgcccttttttactattt

SEQ ID NO: 65625 - DNA, 50 bp, synthetic construct
  source 1..50: mol_type = other DNA
gaaaaaagggtataaaaaaagaaagcttttcccagaacaatatttttttc

SEQ ID NO: 65626 - DNA, 50 bp, synthetic construct
  source 1..50: mol_type = other DNA
aatctactctttttccctgttggctatagacgtacggaaaggagggactt

SEQ ID NO: 65627 - DNA, 50 bp, synthetic construct
  source 1..50: mol_type = other DNA
atctactctttttccctgttggctacagcctcattgaaagcgaggtaagc

SEQ ID NO: 65628 - DNA, 50 bp, synthetic construct
  source 1..50: mol_type = other DNA
ttttataactaaatcatttaatttctttttactattttttcaatataata

SEQ ID NO: 65629 - DNA, 50 bp, synthetic construct
  source 1..50: mol_type = other DNA
tatccttagaaactaatacaatggttagattgtattatagatagttggct

SEQ ID NO: 65630 - DNA, 50 bp, synthetic construct
  source 1..50: mol_type = other DNA
gaatggagctaccaaccttacaattaaatgggaggaaggttatggcagaa

SEQ ID NO: 65631 - DNA, 50 bp, synthetic construct
  source 1..50: mol_type = other DNA
ctgtgtacgtgcgtaccgggagagcggacttcgtggcaccaacagaccag

SEQ ID NO: 65632 - DNA, 50 bp, synthetic construct
  source 1..50: mol_type = other DNA
tgatagatttggtcatggaagcccaggtgcaaccatgaccgccgtgatct

SEQ ID NO: 65633 - DNA, 50 bp, synthetic construct
  source 1..50: mol_type = other DNA
gcgtcacacctcccttcggtagtgtcggtatccgaatggagcgatgctcc

SEQ ID NO: 65634 - DNA, 50 bp, synthetic construct
  source 1..50: mol_type = other DNA
aaatattgccctttactctatgtattccaatagatataaatatcatcatc

SEQ ID NO: 65635 - DNA, 50 bp, synthetic construct
  source 1..50: mol_type = other DNA
tatcagtaatataataggtaaatatggaataatgagttatatcaaatagt

SEQ ID NO: 65636 - DNA, 50 bp, synthetic construct
  source 1..50: mol_type = other DNA
aatatgtattctatagtacgctggaagaagcgtaaagtaaaatacatcat

SEQ ID NO: 65637 - DNA, 50 bp, synthetic construct
  source 1..50: mol_type = other DNA
ttccgcaatcagattgacacgatggtgccgttttcaatccgatagccaaa

SEQ ID NO: 65638 - DNA, 50 bp, synthetic construct
  source 1..50: mol_type = other DNA
ggatggattttctcctaatgttcaagatgcaatattagaagaataaaaaa

SEQ ID NO: 65639 - DNA, 50 bp, synthetic construct
  source 1..50: mol_type = other DNA
aatgtcgaaaacaaagctagcaaatattaatcagcctattagtggaagca

SEQ ID NO: 65640 - DNA, 50 bp, synthetic construct
  source 1..50: mol_type = other DNA
atgtttctattcatctttttggtcaggaattctttggacgataaaaacaa

SEQ ID NO: 65641 - DNA, 50 bp, synthetic construct
  source 1..50: mol_type = other DNA
tcactctaaaagctgtatttatcaagttggtaataaagcttttatgtgga

SEQ ID NO: 65642 - DNA, 50 bp, synthetic construct
  source 1..50: mol_type = other DNA
aatataacctttgtgttaaaacaaaatgttttgaaaacaaatattgataa

SEQ ID NO: 65643 - DNA, 50 bp, synthetic construct
  source 1..50: mol_type = other DNA
ataaaacttcccaaaaggacaaatgcttttgtcatggattcgtgatttca

SEQ ID NO: 65644 - DNA, 50 bp, synthetic construct
  source 1..50: mol_type = other DNA
aagtaattccaagaaccttatcggactagataaaattacactatttactc

SEQ ID NO: 65645 - DNA, 50 bp, synthetic construct
  source 1..50: mol_type = other DNA
ttatttttatattattattatgaaagagtttaataataattaatgagaaa

SEQ ID NO: 65646 - DNA, 50 bp, synthetic construct
  source 1..50: mol_type = other DNA
aagaaaaatccatagtcctgttctctggaattggatttaagttttttttg

SEQ ID NO: 65647 - DNA, 50 bp, synthetic construct
  source 1..50: mol_type = other DNA
ttaatatctacagacatattacatatttgtcgaaaaaaagcagaaatttc

SEQ ID NO: 65648 - DNA, 50 bp, synthetic construct
  source 1..50: mol_type = other DNA
atattagctatggatatgtttgatttttatttcttaaaaggtgttaatta

SEQ ID NO: 65649 - DNA, 50 bp, synthetic construct
  source 1..50: mol_type = other DNA
attaagcaaataaatttttttgtgtatcgtagcaaacgaaaattgttacc

SEQ ID NO: 65650 - DNA, 50 bp, synthetic construct
  source 1..50: mol_type = other DNA
gtcagtatcatcctgttccgggatatgccaaggagagacttgaatctgca

SEQ ID NO: 65651 - DNA, 50 bp, synthetic construct
  source 1..50: mol_type = other DNA
tcccggtcaggaagaaagaaagacaggtttttcagctttggtgatgcgat

SEQ ID NO: 65652 - DNA, 50 bp, synthetic construct
  source 1..50: mol_type = other DNA
ctggaaaggaaaacgcatcgggcgttcgagccctataggtcccattacat

SEQ ID NO: 65653 - DNA, 50 bp, synthetic construct
  source 1..50: mol_type = other DNA
tcgtttaacatccttacgcatattattatatccttaagtgtgtcaatgcc

SEQ ID NO: 65654 - DNA, 50 bp, synthetic construct
  source 1..50: mol_type = other DNA
cccccatcaattctgcaaatcactttcctgatctgtagaaaccctgcaat

SEQ ID NO: 65655 - DNA, 50 bp, synthetic construct
  source 1..50: mol_type = other DNA
gggattttaaaactttaaatgatccttacacctctaaaattttaaatgaa

SEQ ID NO: 65656 - DNA, 50 bp, synthetic construct
  source 1..50: mol_type = other DNA
atcggatgcactgtacagcacacgagagggtgcagtaccaccgtccggat

SEQ ID NO: 65657 - DNA, 50 bp, synthetic construct
  source 1..50: mol_type = other DNA
aaaatatcatcaaaataaggctaaatttggcctttagagtgatatataat

SEQ ID NO: 65658 - DNA, 50 bp, synthetic construct
  source 1..50: mol_type = other DNA
tcatccttggttgaattagtctaactttactaaaataggaccttaaatcc

SEQ ID NO: 65659 - DNA, 50 bp, synthetic construct
  source 1..50: mol_type = other DNA
ggatatagggtattagtatgctgattatgcgtggtatataatatagatat

SEQ ID NO: 65660 - DNA, 50 bp, synthetic construct
  source 1..50: mol_type = other DNA
ctattgaagcagcaactgtttactctatagagaatttgctgaaaaaaata

SEQ ID NO: 65661 - DNA, 50 bp, synthetic construct
  source 1..50: mol_type = other DNA
atctatctgatatgactgctttttcgttaaagcagccaattcctgtttca

SEQ ID NO: 65662 - DNA, 50 bp, synthetic construct
  source 1..50: mol_type = other DNA
tcattttctttgctggaataactgtatagttttccccaaaacgaatcaga

SEQ ID NO: 65663 - DNA, 50 bp, synthetic construct
  source 1..50: mol_type = other DNA
tccaaattcagctgctgctggaatatattctcgataataccgaacctggt

SEQ ID NO: 65664 - DNA, 50 bp, synthetic construct
  source 1..50: mol_type = other DNA
atgataccggcaaccgtaaatcccttccaatttagagttgacggtaaaaa

SEQ ID NO: 65665 - DNA, 50 bp, synthetic construct
  source 1..50: mol_type = other DNA
ttttgtttgctcggaagattctgatttcagattcttccctcggtaccttt

SEQ ID NO: 65666 - DNA, 50 bp, synthetic construct
  source 1..50: mol_type = other DNA
cgcaatcagcagaaatgcaaatactggggttctgttttcatatgattgta

SEQ ID NO: 65667 - DNA, 50 bp, synthetic construct
  source 1..50: mol_type = other DNA
cgaaagggggccgaaatgttataatattgtcatccaaccctctattttct

SEQ ID NO: 65668 - DNA, 50 bp, synthetic construct
  source 1..50: mol_type = other DNA
aaaaagctctcgaaaagagagctaattatcttttttttcgcaaattccaa

SEQ ID NO: 65669 - DNA, 50 bp, synthetic construct
  source 1..50: mol_type = other DNA
tcagtgtaggtatctccgggtgcagggacagcctacgatatcttctgcga

SEQ ID NO: 65670 - DNA, 50 bp, synthetic construct
  source 1..50: mol_type = other DNA
tgacaattaagggtaattggtatgatgctaataatttgacacaatttgtt

SEQ ID NO: 65671 - DNA, 50 bp, synthetic construct
  source 1..50: mol_type = other DNA
gtggtatgttagctctagaaccttgatctgtttgccagctaactcgtgtc

SEQ ID NO: 65672 - DNA, 50 bp, synthetic construct
  source 1..50: mol_type = other DNA
attgaacgctaaagaaataaccccgcggggttattctcttttcctgctca

SEQ ID NO: 65673 - DNA, 50 bp, synthetic construct
  source 1..50: mol_type = other DNA
agaagaagcgtgaaaaggcctgcgacaaaaggctttttataccggacttg

SEQ ID NO: 65674 - DNA, 50 bp, synthetic construct
  source 1..50: mol_type = other DNA
attttgttaagtctacatctgaataaacttctttgtttttcaaccatgag

SEQ ID NO: 65675 - DNA, 50 bp, synthetic construct
  source 1..50: mol_type = other DNA
cccactctcctttcttccttactatatttagtctcactaacttcagtctc

SEQ ID NO: 65676 - DNA, 50 bp, synthetic construct
  source 1..50: mol_type = other DNA
taaatcgaacacctaaattcggtttaaaagaaatttttcttcctcttata

SEQ ID NO: 65677 - DNA, 50 bp, synthetic construct
  source 1..50: mol_type = other DNA
agataatagaaatgttatttatggtaccaaaaatatttttttctttaact

SEQ ID NO: 65678 - DNA, 50 bp, synthetic construct
  source 1..50: mol_type = other DNA
ggtacggacgatctcgtcctgccacggaacaggacgatgctgaccggatg

SEQ ID NO: 65679 - DNA, 50 bp, synthetic construct
  source 1..50: mol_type = other DNA
tctatatatcactctgaaagccaataatgtttcaccaagtgatttgccgc

SEQ ID NO: 65680 - DNA, 50 bp, synthetic construct
  source 1..50: mol_type = other DNA
tgttgcgtcggtaaattctatttgttcataagggatttgacttatgaaca

SEQ ID NO: 65681 - DNA, 50 bp, synthetic construct
  source 1..50: mol_type = other DNA
tttaatagggtttggtgggtattcaagaaaggccgcaaaacctgttcgcc

SEQ ID NO: 65682 - DNA, 50 bp, synthetic construct
  source 1..50: mol_type = other DNA
agttttttggccggtataactgtaatgcactctatttctgcaaataaaga

SEQ ID NO: 65683 - DNA, 50 bp, synthetic construct
  source 1..50: mol_type = other DNA
agattaaccgaaaaactagaagataactcataatctttatgttttaagat

SEQ ID NO: 65684 - DNA, 50 bp, synthetic construct
  source 1..50: mol_type = other DNA
tacgatattttcgatggagaatatgtaaaacaacattcaaaaatattaga

SEQ ID NO: 65685 - DNA, 50 bp, synthetic construct
  source 1..50: mol_type = other DNA
ttttttttggggttttaatgatataatttgtagcaaaccatcagccacaa

SEQ ID NO: 65686 - DNA, 50 bp, synthetic construct
  source 1..50: mol_type = other DNA
tataacgtcatattgggcggcgtaacaggaacgcccaaacaggcgaaagt

SEQ ID NO: 65687 - DNA, 50 bp, synthetic construct
  source 1..50: mol_type = other DNA
ttactaccatctttatgtgtttttgcaaagataggtaaagtttacaagac

SEQ ID NO: 65688 - DNA, 50 bp, synthetic construct
  source 1..50: mol_type = other DNA
cgattttaatcaatttcaatcttttaaaagatacaatatgagcgaacaaa

SEQ ID NO: 65689 - DNA, 50 bp, synthetic construct
  source 1..50: mol_type = other DNA
acatgaagattatgagttggtagatatcataagactcttaatcttcaagt

SEQ ID NO: 65690 - DNA, 50 bp, synthetic construct
  source 1..50: mol_type = other DNA
agtaactgtaactagtaagttgcagttgccagtagcttatcatcattttg

SEQ ID NO: 65691 - DNA, 50 bp, synthetic construct
  source 1..50: mol_type = other DNA
atagaactgaattacgctatgagtacctacataggtggctttatttgtag

SEQ ID NO: 65692 - DNA, 50 bp, synthetic construct
  source 1..50: mol_type = other DNA
gatatagcaagatggctcaatgataaaagtcttagcgaccttattaaata

SEQ ID NO: 65693 - DNA, 50 bp, synthetic construct
  source 1..50: mol_type = other DNA
cacgcgaggtggagtggcattagtggcaagtccacagtcttcaacgcgct

SEQ ID NO: 65694 - DNA, 50 bp, synthetic construct
  source 1..50: mol_type = other DNA
gctttataccaatctggtgagccatttacaaggaattattgggctaaaag

SEQ ID NO: 65695 - DNA, 50 bp, synthetic construct
  source 1..50: mol_type = other DNA
ccagataatttgtggtgtgtttcaaaagaaacatgatgatccttatcggc

SEQ ID NO: 65696 - DNA, 50 bp, synthetic construct
  source 1..50: mol_type = other DNA
gcaactcccagagtgtttcggtcagatgtccagtacaaaatgggcggtgt

SEQ ID NO: 65697 - DNA, 50 bp, synthetic construct
  source 1..50: mol_type = other DNA
tatttttagttggtaaatttgatttacaaggaattattgggctaaaagct

SEQ ID NO: 65698 - DNA, 50 bp, synthetic construct
  source 1..50: mol_type = other DNA
ctattgacatgttttatcgtcaaatcaagggaggtgtaaaatgagtgcca

SEQ ID NO: 65699 - DNA, 50 bp, synthetic construct
  source 1..50: mol_type = other DNA
acagatagaaattgcaaaaacatattacatttttttataattctatctca

SEQ ID NO: 65700 - DNA, 50 bp, synthetic construct
  source 1..50: mol_type = other DNA
ttcatttttcctcctagaagaagtttcatttttccgatgcgcaaacgaca

SEQ ID NO: 65701 - DNA, 50 bp, synthetic construct
  source 1..50: mol_type = other DNA
caagtccacatcactgtaagtttccaaggtgttgatgtaatagttcctat

SEQ ID NO: 65702 - DNA, 50 bp, synthetic construct
  source 1..50: mol_type = other DNA
ttgtatatataaaacccggtattcccgaatacgacggctttgtcatcgaa

SEQ ID NO: 65703 - DNA, 50 bp, synthetic construct
  source 1..50: mol_type = other DNA
tatcaagttatgagaatcaggttaatttctttggagacaatagattcagg

SEQ ID NO: 65704 - DNA, 50 bp, synthetic construct
  source 1..50: mol_type = other DNA
ttttaggggtttaatgatataatgaatatgcgttcattaaaaaattaaga

SEQ ID NO: 65705 - DNA, 50 bp, synthetic construct
  source 1..50: mol_type = other DNA
aagaggcggtgcgacatttgggttatcataaaaaagattaaccgctgccg

SEQ ID NO: 65706 - DNA, 50 bp, synthetic construct
  source 1..50: mol_type = other DNA
tctccgaaatattgccgtttcgttgttatatgccggcaaaaaagcagaga

SEQ ID NO: 65707 - DNA, 50 bp, synthetic construct
  source 1..50: mol_type = other DNA
cggatgaaggaatctccgcaactaatatcttgttaaggactctgaaaatg

SEQ ID NO: 65708 - DNA, 50 bp, synthetic construct
  source 1..50: mol_type = other DNA
aaaatacaagggtgatgctttgcttcagaaaaaaatcagagtagccgctt

SEQ ID NO: 65709 - DNA, 50 bp, synthetic construct
  source 1..50: mol_type = other DNA
gctactggcaactttgattttattaaaacaatatcgacgtttataatctc

SEQ ID NO: 65710 - DNA, 50 bp, synthetic construct
  source 1..50: mol_type = other DNA
cgccttgtccacattcgctgcgtcgcaaagcagctcctctttacaaattg

SEQ ID NO: 65711 - DNA, 50 bp, synthetic construct
  source 1..50: mol_type = other DNA
atcttaaaacatgaagattatgagttatcttctagtttttcggttaatct

SEQ ID NO: 65712 - DNA, 50 bp, synthetic construct
  source 1..50: mol_type = other DNA
gtatattacggcggttttcaaatttaaataagaaatatgatgaaatgcag

SEQ ID NO: 65713 - DNA, 50 bp, synthetic construct
  source 1..50: mol_type = other DNA
acaccctgtaatgcaaaaccctgtcgacttctttttgcatttttgtaggt

SEQ ID NO: 65714 - DNA, 50 bp, synthetic construct
  source 1..50: mol_type = other DNA
ataatctcggctaaatacggacagaaaataccattcgtgtaaagcattat

SEQ ID NO: 65715 - DNA, 50 bp, synthetic construct
  source 1..50: mol_type = other DNA
ataacagcaatatcagacattataaatataaagtttgttaagcctgtttt

SEQ ID NO: 65716 - DNA, 50 bp, synthetic construct
  source 1..50: mol_type = other DNA
atatgtccttaaacagcatgggctcacggaaaggacggttatgaggatag

SEQ ID NO: 65717 - DNA, 50 bp, synthetic construct
  source 1..50: mol_type = other DNA
ttcatattttctaccttttataggaaattattgaatcaagaaacaatgta

SEQ ID NO: 65718 - DNA, 50 bp, synthetic construct
  source 1..50: mol_type = other DNA
ttcgtctaactgttctcaatttgatagctaattcagaagctttttctcta

SEQ ID NO: 65719 - DNA, 50 bp, synthetic construct
  source 1..50: mol_type = other DNA
tatgagttgttttataatttagaaatttaacagatataaaacatttaatt

SEQ ID NO: 65720 - DNA, 50 bp, synthetic construct
  source 1..50: mol_type = other DNA
gatattaatttatggtgcaattatatctagggacagcatagcaggcagat

SEQ ID NO: 65721 - DNA, 50 bp, synthetic construct
  source 1..50: mol_type = other DNA
tgagtctaattccctcatttttgatattaaaaagtaacgaagctgacttc

SEQ ID NO: 65722 - DNA, 50 bp, synthetic construct
  source 1..50: mol_type = other DNA
tgcaccccctcaataagtccgtacaataaccatctgatagttcaaatgca

SEQ ID NO: 65723 - DNA, 50 bp, synthetic construct
  source 1..50: mol_type = other DNA
agaggtaataagtatgcattagagtaatttcattataccattaaacccct

SEQ ID NO: 65724 - DNA, 50 bp, synthetic construct
  source 1..50: mol_type = other DNA
cacaaaaatatagatctctgcaattagttgctgaaatgccttcatctgca

SEQ ID NO: 65725 - DNA, 50 bp, synthetic construct
  source 1..50: mol_type = other DNA
cttaaatatcctcgctctttaaaagaatttaaacaatatccacatttata

SEQ ID NO: 65726 - DNA, 50 bp, synthetic construct
  source 1..50: mol_type = other DNA
taataaacatagaaaaagagccgagcttatgttgttctctaaatctcttt

SEQ ID NO: 65727 - DNA, 50 bp, synthetic construct
  source 1..50: mol_type = other DNA
ggaagacttacatgaataccctagcgcgccggtgttctcatcgacgatat

SEQ ID NO: 65728 - DNA, 50 bp, synthetic construct
  source 1..50: mol_type = other DNA
acaccgctagaacagcgttatttgcgacctcaccgatattggtgcggtgt

SEQ ID NO: 65729 - DNA, 50 bp, synthetic construct
  source 1..50: mol_type = other DNA
tcacatttgtttttatggaaattataagattctgcaaaatcaaaatatgc

SEQ ID NO: 65730 - DNA, 50 bp, synthetic construct
  source 1..50: mol_type = other DNA
atcccgatggtggtaaccgatgaggtatatttggtgatggtcgccggaat

SEQ ID NO: 65731 - DNA, 50 bp, synthetic construct
  source 1..50: mol_type = other DNA
gtagaaaatagtcatgaagcaataattatttctcaagaaatattcaataa

SEQ ID NO: 65732 - DNA, 50 bp, synthetic construct
  source 1..50: mol_type = other DNA
atttttctttttatcattattgataatctctcatagtaaaaaagaaaaaa

SEQ ID NO: 65733 - DNA, 50 bp, synthetic construct
  source 1..50: mol_type = other DNA
ttcaagcacttttctacttgaaatgcataaaaagtaataaaaaactcaaa

SEQ ID NO: 65734 - DNA, 50 bp, synthetic construct
  source 1..50: mol_type = other DNA
cacttcttattgacaattctctaatcgccgagcattgcggtgttccagtg

SEQ ID NO: 65735 - DNA, 50 bp, synthetic construct
  source 1..50: mol_type = other DNA
atttttctttttatcatcattgataatctctcatagtaaaaaagaaaaaa

SEQ ID NO: 65736 - DNA, 50 bp, synthetic construct
  source 1..50: mol_type = other DNA
gacggcggataattgttcagattatgcaatatgaacagttatgatatctc

SEQ ID NO: 65737 - DNA, 50 bp, synthetic construct
  source 1..50: mol_type = other DNA
agagagcaaatttatattataaaaattagaatcattaaaaattaatttat

SEQ ID NO: 65738 - DNA, 50 bp, synthetic construct
  source 1..50: mol_type = other DNA
cgacatagacaagcgtttttgtaattatcgcaaaaagcttgctcggaata

SEQ ID NO: 65739 - DNA, 50 bp, synthetic construct
  source 1..50: mol_type = other DNA
cagatattatccagcgatattgcggacggaaacgcggtctcaaaagcgca

SEQ ID NO: 65740 - DNA, 50 bp, synthetic construct
  source 1..50: mol_type = other DNA
tccacgattgagagcgtgatttattttcaaaaaccgctctcaacgtaaac

SEQ ID NO: 65741 - DNA, 50 bp, synthetic construct
  source 1..50: mol_type = other DNA
aatcatgaaccaatcttagatagagaaaaaggtcaaggtagccgcttatt

SEQ ID NO: 65742 - DNA, 50 bp, synthetic construct
  source 1..50: mol_type = other DNA
ttttttacacaatcttccccataaatttttacagaagaaactgaagaaaa

SEQ ID NO: 65743 - DNA, 50 bp, synthetic construct
  source 1..50: mol_type = other DNA
ttttattggattttttatatcaagaatgatatgttatgaatatgtggagg

SEQ ID NO: 65744 - DNA, 50 bp, synthetic construct
  source 1..50: mol_type = other DNA
ggatttgacccctatgaaaagaaactactctataaatctacctcagttcc

SEQ ID NO: 65745 - DNA, 50 bp, synthetic construct
  source 1..50: mol_type = other DNA
gcagcgttttattttttctgacatgcctctgattgcaaatattccgcttc

SEQ ID NO: 65746 - DNA, 50 bp, synthetic construct
  source 1..50: mol_type = other DNA
agcaaccgcctgatgattatccgaaaatggacgatgtgcaggctccgccc

SEQ ID NO: 65747 - DNA, 50 bp, synthetic construct
  source 1..50: mol_type = other DNA
ctgtgtaaaagggagtgcatataggaatatggacaccgcctttatacggc

SEQ ID NO: 65748 - DNA, 50 bp, synthetic construct
  source 1..50: mol_type = other DNA
cgacggatcggaattgcttgaaaacttcgcaaaaaacttcgtatatattg

SEQ ID NO: 65749 - DNA, 50 bp, synthetic construct
  source 1..50: mol_type = other DNA
aggaagttgtctttgaaaattgcaaagcggtttgtaaaagaatacttcgg

SEQ ID NO: 65750 - DNA, 50 bp, synthetic construct
  source 1..50: mol_type = other DNA
ttgtgaagtttctcctcagcctggcagcagggagagggaaagctgtaccg

SEQ ID NO: 65751 - DNA, 50 bp, synthetic construct
  source 1..50: mol_type = other DNA
gtgaacgtaatgccgctttgatcagttgataaaaacggcattgttttgcg

SEQ ID NO: 65752 - DNA, 50 bp, synthetic construct
  source 1..50: mol_type = other DNA
taccccaaattcacgcgccaccctatccggtcaggcaggcagaataccta

SEQ ID NO: 65753 - DNA, 50 bp, synthetic construct
  source 1..50: mol_type = other DNA
ccggaagatttttctgatgtaggacagccaaaggcataaagggcttccat

SEQ ID NO: 65754 - DNA, 50 bp, synthetic construct
  source 1..50: mol_type = other DNA
aaaagaaggcagcagttgtaaccaagcaggcagaatacatttatagtttg

SEQ ID NO: 65755 - DNA, 50 bp, synthetic construct
  source 1..50: mol_type = other DNA
ctcccattttactgtcaaatctatttatatatgagggttttaaataaatc

SEQ ID NO: 65756 - DNA, 50 bp, synthetic construct
  source 1..50: mol_type = other DNA
agtgatcgatggacagatacggatagatcctgccatgcaggcgcaatacc

SEQ ID NO: 65757 - DNA, 50 bp, synthetic construct
  source 1..50: mol_type = other DNA
ttgtgtgcccttgtcaagagatgtaagcattggcagacaagggctgttct

SEQ ID NO: 65758 - DNA, 50 bp, synthetic construct
  source 1..50: mol_type = other DNA
gagctatgattgatcacatatgttctttgctggctgttatttttgtactc

SEQ ID NO: 65759 - DNA, 50 bp, synthetic construct
  source 1..50: mol_type = other DNA
agaagaattacatctaaagcaagcatgcttgcaataggcgttctttttat

SEQ ID NO: 65760 - DNA, 50 bp, synthetic construct
  source 1..50: mol_type = other DNA
ttcgtgacttttttcaagggaagtcccgctcagtaagaatctgatgaaag

SEQ ID NO: 65761 - DNA, 50 bp, synthetic construct
  source 1..50: mol_type = other DNA
atacaaaaaagaaaagccctctatagatacaggtttttcagctttggtga

SEQ ID NO: 65762 - DNA, 50 bp, synthetic construct
  source 1..50: mol_type = other DNA
acgcaccaggcaaaaagcccgatgatcaatgggcttgagctgtcggacgc

SEQ ID NO: 65763 - DNA, 50 bp, synthetic construct
  source 1..50: mol_type = other DNA
cgtccttggaaacaggtcgagggcgggcttgaagatgaagatgcagcgcg

SEQ ID NO: 65764 - DNA, 50 bp, synthetic construct
  source 1..50: mol_type = other DNA
ctacttatattctttcaaaaattttacgatgaatgtagctatatacttac

SEQ ID NO: 65765 - DNA, 50 bp, synthetic construct
  source 1..50: mol_type = other DNA
aaaaaaccataaaagatatggtatatctacactaagattgcgtgttagtt

SEQ ID NO: 65766 - DNA, 50 bp, synthetic construct
  source 1..50: mol_type = other DNA
tttgatgggacatacaccacttggctccaaggatatcggcatcaatcatt

SEQ ID NO: 65767 - DNA, 50 bp, synthetic construct
  source 1..50: mol_type = other DNA
ccatgaaaccacctcactacactatatcctatagagaggtgatacaatga

SEQ ID NO: 65768 - DNA, 50 bp, synthetic construct
  source 1..50: mol_type = other DNA
cacttgccatggctgcccgaagatgattctttctccacatatatcagctt

SEQ ID NO: 65769 - DNA, 50 bp, synthetic construct
  source 1..50: mol_type = other DNA
tctactatctgtataccacagtaagaacctggtgaagtacagacagtaga

SEQ ID NO: 65770 - DNA, 50 bp, synthetic construct
  source 1..50: mol_type = other DNA
tacgtaggagacgccagtatccttacccaaagtggataattccgtccaag

SEQ ID NO: 65771 - DNA, 50 bp, synthetic construct
  source 1..50: mol_type = other DNA
acctgctagaatgctcaaggaatttgcctcccattagcatatgaggaggt

SEQ ID NO: 65772 - DNA, 50 bp, synthetic construct
  source 1..50: mol_type = other DNA
ggaacctttcagttccaaaattgagtcccattgtcatatcctttccgtca

SEQ ID NO: 65773 - DNA, 50 bp, synthetic construct
  source 1..50: mol_type = other DNA
catgaccgccgtcctctccggcgaagccgcaatatccgaactggttgcca

SEQ ID NO: 65774 - DNA, 50 bp, synthetic construct
  source 1..50: mol_type = other DNA
ttttttgtagttgtgttaggaataagtatttatattcgaatataaaacac

SEQ ID NO: 65775 - DNA, 50 bp, synthetic construct
  source 1..50: mol_type = other DNA
agatattctgaaacaagatattgatgatataatcggctttcagagtgata

SEQ ID NO: 65776 - DNA, 50 bp, synthetic construct
  source 1..50: mol_type = other DNA
gattttacaccgcaacgactgattttgtccagaccgggatgtttaacgat

SEQ ID NO: 65777 - DNA, 50 bp, synthetic construct
  source 1..50: mol_type = other DNA
ttattggatatatttgtaagacatatactttttattagtatatgtcataa

SEQ ID NO: 65778 - DNA, 50 bp, synthetic construct
  source 1..50: mol_type = other DNA
ctcaactgccgtttctaaaagcagggctgcttgaacaatttttacttcag

SEQ ID NO: 65779 - DNA, 50 bp, synthetic construct
  source 1..50: mol_type = other DNA
aaaacgggccatgatatagcaatgataaatgccgccgcactgtccgcaga

SEQ ID NO: 65780 - DNA, 50 bp, synthetic construct
  source 1..50: mol_type = other DNA
gttacccttgctcgtacataaaaattggttgatattcgagcaattctgaa

SEQ ID NO: 65781 - DNA, 50 bp, synthetic construct
  source 1..50: mol_type = other DNA
tggtgtcatggttccatccgcgaggttgtggtgatggcggcatgcttggc

SEQ ID NO: 65782 - DNA, 50 bp, synthetic construct
  source 1..50: mol_type = other DNA
tgtgccacgttttctcctttcgcgttagccgtgacctgccgaaatacttc

SEQ ID NO: 65783 - DNA, 50 bp, synthetic construct
  source 1..50: mol_type = other DNA
cgtacaaaaccgctgaataagaaaaagcccgggatcaggctcatcaacaa

SEQ ID NO: 65784 - DNA, 50 bp, synthetic construct
  source 1..50: mol_type = other DNA
gcttgcgtcaaaaaccttgtccaatagaagaaaatgaatttgacaaaagc

SEQ ID NO: 65785 - DNA, 50 bp, synthetic construct
  source 1..50: mol_type = other DNA
aatttgttgtgtcggcatcaagcaagcaaatgatgcctgtgtggcgtatt

SEQ ID NO: 65786 - DNA, 50 bp, synthetic construct
  source 1..50: mol_type = other DNA
ttttatttcaaaaggtgaaaaggctgcccttttaactttgaataacaaag

SEQ ID NO: 65787 - DNA, 50 bp, synthetic construct
  source 1..50: mol_type = other DNA
tgcaaataagtcaattattaaaattaaggagtgatataatggtatttgca

SEQ ID NO: 65788 - DNA, 50 bp, synthetic construct
  source 1..50: mol_type = other DNA
tgttgacgcacaggctaaggctcttccttcaggtagcgtagacgtcaaca

SEQ ID NO: 65789 - DNA, 50 bp, synthetic construct
  source 1..50: mol_type = other DNA
gaaaattgactgggattcaaaagaggcattgcaaatcgttgactcagata

SEQ ID NO: 65790 - DNA, 50 bp, synthetic construct
  source 1..50: mol_type = other DNA
catcaaaattcgttccggtgaaaccggtttttcaggcgtgagctttgagc

SEQ ID NO: 65791 - DNA, 50 bp, synthetic construct
  source 1..50: mol_type = other DNA
ggcgtaaatcaccgccttcatccgcatcgaggaaatcggctattacaacc

SEQ ID NO: 65792 - DNA, 50 bp, synthetic construct
  source 1..50: mol_type = other DNA
cttttttggacactatcctaaaagtttattttgcataacacatcaaaaag

SEQ ID NO: 65793 - DNA, 50 bp, synthetic construct
  source 1..50: mol_type = other DNA
ggcgatggctgccgctgcacgcattccggcgggcagcggcagcgtgcggc

SEQ ID NO: 65794 - DNA, 50 bp, synthetic construct
  source 1..50: mol_type = other DNA
gttttcatagttcttgataatgtggccacaggataataaacaggatcata

SEQ ID NO: 65795 - DNA, 50 bp, synthetic construct
  source 1..50: mol_type = other DNA
tgattctctaaataactcaggagtatcactgagccagtttattacaaggc

SEQ ID NO: 65796 - DNA, 50 bp, synthetic construct
  source 1..50: mol_type = other DNA
cctcaatcttttccttatctgtacttatacagataaagacatccttgacg

SEQ ID NO: 65797 - DNA, 50 bp, synthetic construct
  source 1..50: mol_type = other DNA
gttgtcggtaaggttgatgatattttccgttcaccatgcagtatccgaac

SEQ ID NO: 65798 - DNA, 50 bp, synthetic construct
  source 1..50: mol_type = other DNA
tcccgcgaattgcaagcccggcgtcggcctgaggaataaaagtcgccgcc

SEQ ID NO: 65799 - DNA, 50 bp, synthetic construct
  source 1..50: mol_type = other DNA
ccctcctttgcgccagcgcccgttgcagaccagccgggaggaaaggatgc

SEQ ID NO: 65800 - DNA, 50 bp, synthetic construct
  source 1..50: mol_type = other DNA
cggtcggtaatgcaaaaatccgcaccggcgcaccacagcatttctggcca

SEQ ID NO: 65801 - DNA, 50 bp, synthetic construct
  source 1..50: mol_type = other DNA
caagaatctgaccggtgccgcgaagctgatcgactccgaagggagtgtgt

SEQ ID NO: 65802 - DNA, 50 bp, synthetic construct
  source 1..50: mol_type = other DNA
gcacaaaacctgctcaccacatacaaaaatgtgttgaacgagttttatgc

SEQ ID NO: 65803 - DNA, 50 bp, synthetic construct
  source 1..50: mol_type = other DNA
tgtggactcgcaggctgatgcagcgggttagcaagttaggcgaagacagc

SEQ ID NO: 65804 - DNA, 50 bp, synthetic construct
  source 1..50: mol_type = other DNA
tgggtgcaatgagcatctgaaaggcttatccgggattcagagcgaacatg

SEQ ID NO: 65805 - DNA, 50 bp, synthetic construct
  source 1..50: mol_type = other DNA
ttttgtactaacttaacacagcccacgggtagtgttcaattagtacaaca

SEQ ID NO: 65806 - DNA, 50 bp, synthetic construct
  source 1..50: mol_type = other DNA
gcagttttcgctcgattttctctacttacaacttatctcaacaaaggtga

SEQ ID NO: 65807 - DNA, 50 bp, synthetic construct
  source 1..50: mol_type = other DNA
atttctgccactcttcgtattccttaaggagcgaaaagaaatggccaaat

SEQ ID NO: 65808 - DNA, 50 bp, synthetic construct
  source 1..50: mol_type = other DNA
caaacaatgtgcaggtgattccggcaaactcaacttctgcatcccctttg

SEQ ID NO: 65809 - DNA, 50 bp, synthetic construct
  source 1..50: mol_type = other DNA
gaaaagataccactccagccgaaccatgttcattcgatagcagtttttta

SEQ ID NO: 65810 - DNA, 50 bp, synthetic construct
  source 1..50: mol_type = other DNA
cacggatggttacctcaccttttccggaaaacaaatctcttttttccgga

SEQ ID NO: 65811 - DNA, 50 bp, synthetic construct
  source 1..50: mol_type = other DNA
ggctgcgcctgctctggacacaggaggttagaaaaatgccagttgcaaaa

SEQ ID NO: 65812 - DNA, 50 bp, synthetic construct
  source 1..50: mol_type = other DNA
gatcagggtctggataagatcccggacgccgtctccctttccgcgggagg

SEQ ID NO: 65813 - DNA, 50 bp, synthetic construct
  source 1..50: mol_type = other DNA
tgcccagtttcagccggatcaggtcaagcccatcgtgctggagcgcggcc

SEQ ID NO: 65814 - DNA, 50 bp, synthetic construct
  source 1..50: mol_type = other DNA
cttgtggacttatggaatttgagatacgaatgcgtccggaaccccaccat

SEQ ID NO: 65815 - DNA, 50 bp, synthetic construct
  source 1..50: mol_type = other DNA
ttgtcgttgcgatcccgtcttgcgttgaggagacggaaacaaaatgaatg

SEQ ID NO: 65816 - DNA, 50 bp, synthetic construct
  source 1..50: mol_type = other DNA
tcctccgcgcctttagaataagcggcaaaagcttctgaaggttacatatt

SEQ ID NO: 65817 - DNA, 50 bp, synthetic construct
  source 1..50: mol_type = other DNA
tactcaatgttcgtcacctctgtctttatgtttagaaatacgattgaatt

SEQ ID NO: 65818 - DNA, 50 bp, synthetic construct
  source 1..50: mol_type = other DNA
gatgggatacattttcgaagaactgaggtagttttcaaataatctccgaa

SEQ ID NO: 65819 - DNA, 50 bp, synthetic construct
  source 1..50: mol_type = other DNA
tccttcgttgctattgccagaaagctgaacatggcaacggtaacgaaaat

SEQ ID NO: 65820 - DNA, 50 bp, synthetic construct
  source 1..50: mol_type = other DNA
gcaggcgaaaacctgctctcaacatatggttgtttaggagtttccatata

SEQ ID NO: 65821 - DNA, 50 bp, synthetic construct
  source 1..50: mol_type = other DNA
ttcgcatttctagtgtccaactctcgatttcgggggcgattccctgcggt

SEQ ID NO: 65822 - DNA, 50 bp, synthetic construct
  source 1..50: mol_type = other DNA
atcacctccttgcagtgtcacatatttaattgacactgccatttgcatat

SEQ ID NO: 65823 - DNA, 50 bp, synthetic construct
  source 1..50: mol_type = other DNA
cacgaatggcacgttctcgttcaagcttcgtcaacaacagcctttccgtc

SEQ ID NO: 65824 - DNA, 50 bp, synthetic construct
  source 1..50: mol_type = other DNA
taggcattgatgatctcacccatcaggatgaatgacctcttgcttgactg

SEQ ID NO: 65825 - DNA, 50 bp, synthetic construct
  source 1..50: mol_type = other DNA
cccgtgacatgacgccggaacaaattttttgcagggcggtacaattaaga

SEQ ID NO: 65826 - DNA, 50 bp, synthetic construct
  source 1..50: mol_type = other DNA
atgccaggtcaatgatctgtgtcggttgacacacggcagtaggctgccac

SEQ ID NO: 65827 - DNA, 50 bp, synthetic construct
  source 1..50: mol_type = other DNA
aattttttcatgcaaatctcctttttaaaggccgcttgtcacacccaagt

SEQ ID NO: 65828 - DNA, 50 bp, synthetic construct
  source 1..50: mol_type = other DNA
acttgtataagaaggtattatgtaattaaatagagcatctttacctttcc

SEQ ID NO: 65829 - DNA, 50 bp, synthetic construct
  source 1..50: mol_type = other DNA
cgataaactcggagcttacaaagcgctcattttacgcaccaactttcaat

SEQ ID NO: 65830 - DNA, 50 bp, synthetic construct
  source 1..50: mol_type = other DNA
taaacaataagattaaaaatcactttctattcttccaattttattaaaat

SEQ ID NO: 65831 - DNA, 50 bp, synthetic construct
  source 1..50: mol_type = other DNA
atcaatttgagaaaaaatttcatattaaaactatttcttcaataacttcc

SEQ ID NO: 65832 - DNA, 50 bp, synthetic construct
  source 1..50: mol_type = other DNA
tggaaagcggtaagttcaatacttgcaaatttcacactttacgcttgatt

SEQ ID NO: 65833 - DNA, 50 bp, synthetic construct
  source 1..50: mol_type = other DNA
tctgcgttcacatgatacctcctttaaccgaggtatcgcatgaaatttaa

SEQ ID NO: 65834 - DNA, 50 bp, synthetic construct
  source 1..50: mol_type = other DNA
gaattttcttttatacatttttctaattaaaaatttattaaagaaaatgg

SEQ ID NO: 65835 - DNA, 50 bp, synthetic construct
  source 1..50: mol_type = other DNA
gtccaactttgactgcgtgagcggtctttctgctgtagtgaaagcgtgaa

SEQ ID NO: 65836 - DNA, 50 bp, synthetic construct
  source 1..50: mol_type = other DNA
tacattgcctgtacttatagcttgcgcagtgtatgcctgtaggcgctgtt

SEQ ID NO: 65837 - DNA, 50 bp, synthetic construct
  source 1..50: mol_type = other DNA
ccttgccaccggcctgcaggacggtatcgtggttacggatttggccattt

SEQ ID NO: 65838 - DNA, 50 bp, synthetic construct
  source 1..50: mol_type = other DNA
gtttcgtataggctaaaattaaaattttttattatttaagcaatgcaaaa

SEQ ID NO: 65839 - DNA, 50 bp, synthetic construct
  source 1..50: mol_type = other DNA
atttaaaggtcatttttttatgaccttttccagacaattagaattatagc

SEQ ID NO: 65840 - DNA, 50 bp, synthetic construct
  source 1..50: mol_type = other DNA
atttttgattttgggcattgcaaaatttttctaccccttaacgaaaaaaa

SEQ ID NO: 65841 - DNA, 50 bp, synthetic construct
  source 1..50: mol_type = other DNA
atgtgccgaaaacaggcttatatttccttatgagccgactgatatacggt

SEQ ID NO: 65842 - DNA, 50 bp, synthetic construct
  source 1..50: mol_type = other DNA
gataccagcattactaaataagcaattgattatattttaatgcttgtagc

SEQ ID NO: 65843 - DNA, 50 bp, synthetic construct
  source 1..50: mol_type = other DNA
atttcttttcgctccttatttttttgggaatataaaaatgactaagaaat

SEQ ID NO: 65844 - DNA, 50 bp, synthetic construct
  source 1..50: mol_type = other DNA
gacttgaattccttcacgatctccgacacgagcgtaggccgccacacgtc

SEQ ID NO: 65845 - DNA, 50 bp, synthetic construct
  source 1..50: mol_type = other DNA
cctttttataagcatttttaatctcaaatatacagagcgttataaaaaac

SEQ ID NO: 65846 - DNA, 50 bp, synthetic construct
  source 1..50: mol_type = other DNA
ccgtgcaggcttcatggccaagctggaggaacaccatgaagaaagatacc

SEQ ID NO: 65847 - DNA, 50 bp, synthetic construct
  source 1..50: mol_type = other DNA
ctggtaacatttcaaattcatctaaacacatttttttaaaaaaatctata

SEQ ID NO: 65848 - DNA, 50 bp, synthetic construct
  source 1..50: mol_type = other DNA
ataaattattcaaatttaaattctcctatttttaaattagaaatcaaaaa

SEQ ID NO: 65849 - DNA, 50 bp, synthetic construct
  source 1..50: mol_type = other DNA
tttataatttgcattccttttatattttcaaaagctataggaaaaataaa

SEQ ID NO: 65850 - DNA, 50 bp, synthetic construct
  source 1..50: mol_type = other DNA
ccagaatatgatacgaactcataatcggtctcggaactatcaaatgctgc

SEQ ID NO: 65851 - DNA, 50 bp, synthetic construct
  source 1..50: mol_type = other DNA
cagggtaaaggtttccgtatgatcatgcaaatattgaaagcaatatagat

SEQ ID NO: 65852 - DNA, 50 bp, synthetic construct
  source 1..50: mol_type = other DNA
tgtcagcacagtcgcagatttcggtgatgagttcgaccttcatgccgaca

SEQ ID NO: 65853 - DNA, 50 bp, synthetic construct
  source 1..50: mol_type = other DNA
ccgtaattctatcaaaattacggtggactacggaaatgagggagacagcg

SEQ ID NO: 65854 - DNA, 50 bp, synthetic construct
  source 1..50: mol_type = other DNA
tggatatgaaacagttggtgctatgttttgcccgaactgcggtaagataa

SEQ ID NO: 65855 - DNA, 50 bp, synthetic construct
  source 1..50: mol_type = other DNA
tgtgttttctcatttctcggtttctataaatagagcgggataaaaacagg

SEQ ID NO: 65856 - DNA, 50 bp, synthetic construct
  source 1..50: mol_type = other DNA
caaattacatcagtgagaatccactctgagattggcacagatggaattta

SEQ ID NO: 65857 - DNA, 50 bp, synthetic construct
  source 1..50: mol_type = other DNA
aaaaaaaacacctttgcaggtgtaagttcacctgcatcttccaggatatc

SEQ ID NO: 65858 - DNA, 50 bp, synthetic construct
  source 1..50: mol_type = other DNA
tttcttaaataaattacatacataatccaggatgttttccttttactaaa

SEQ ID NO: 65859 - DNA, 50 bp, synthetic construct
  source 1..50: mol_type = other DNA
caggaagaccagcttcacagttttgaaattttttgaagacaaattgacaa

SEQ ID NO: 65860 - DNA, 50 bp, synthetic construct
  source 1..50: mol_type = other DNA
ggaaacctcctcatcatcacccaagcagcagtgatgcattggtggtttta

SEQ ID NO: 65861 - DNA, 50 bp, synthetic construct
  source 1..50: mol_type = other DNA
tacacggaaaagtgtaaaagaaaaggctttctttctagtctttcccattc

SEQ ID NO: 65862 - DNA, 50 bp, synthetic construct
  source 1..50: mol_type = other DNA
ttttttttctttttttctgccatggccatgagtgaaaacaataaaaaata

SEQ ID NO: 65863 - DNA, 50 bp, synthetic construct
  source 1..50: mol_type = other DNA
aaaagtagaaatgtcagttaaaaagaactttaaggagtttttctatactc

SEQ ID NO: 65864 - DNA, 50 bp, synthetic construct
  source 1..50: mol_type = other DNA
agattataaaacggtcagtctctttcataagactgaccgttttataaata

SEQ ID NO: 65865 - DNA, 50 bp, synthetic construct
  source 1..50: mol_type = other DNA
acatctgacccagtgcttggagaattgttgccgtctgaatcatcagacag

SEQ ID NO: 65866 - DNA, 50 bp, synthetic construct
  source 1..50: mol_type = other DNA
gtttgtacttgttccaataatccgtaagggattcagagctaatatgtgac

SEQ ID NO: 65867 - DNA, 50 bp, synthetic construct
  source 1..50: mol_type = other DNA
tcgtcagcggtgtcgaatatgaagatttgcacattcgacaaaccgatttt

SEQ ID NO: 65868 - DNA, 50 bp, synthetic construct
  source 1..50: mol_type = other DNA
atgttaactctgaatacttttgctgtcgaaatataattggcatttaactt

SEQ ID NO: 65869 - DNA, 50 bp, synthetic construct
  source 1..50: mol_type = other DNA
ttgcacctcgacaaccagttcgagatcggaaaccctccacatagaggcac

SEQ ID NO: 65870 - DNA, 50 bp, synthetic construct
  source 1..50: mol_type = other DNA
tccccgtgtatctatggtcttattcgccggtatcagccgttttccgggga

SEQ ID NO: 65871 - DNA, 50 bp, synthetic construct
  source 1..50: mol_type = other DNA
atggccgacctttcggagccagagccagctggggaagaaacgatggactc

SEQ ID NO: 65872 - DNA, 50 bp, synthetic construct
  source 1..50: mol_type = other DNA
ttgcaacttatgactatttgggcagttcatataagcgtcagttattgaag

SEQ ID NO: 65873 - DNA, 50 bp, synthetic construct
  source 1..50: mol_type = other DNA
cagtttgccatcagctgcatgaagcacatccgaaggaggtgattcaaatg

SEQ ID NO: 65874 - DNA, 50 bp, synthetic construct
  source 1..50: mol_type = other DNA
tgtgcaaaattttctgaacaccacgccgacattgtgaaaaccaggcaggt

SEQ ID NO: 65875 - DNA, 50 bp, synthetic construct
  source 1..50: mol_type = other DNA
tcaaacagtaaacaccgccgcatagaatgcgccggaaaaatactgtttga

SEQ ID NO: 65876 - DNA, 50 bp, synthetic construct
  source 1..50: mol_type = other DNA
agatatctgcgtctgattcatagattgctattattggctttcagagtgat

SEQ ID NO: 65877 - DNA, 50 bp, synthetic construct
  source 1..50: mol_type = other DNA
tctctgaaattccaaagacagcataggtaaggattgtggaaattcagatc

SEQ ID NO: 65878 - DNA, 50 bp, synthetic construct
  source 1..50: mol_type = other DNA
atcgcgcagccaagccatgccgtgctgatcgtctccttgaaggacgcagc

SEQ ID NO: 65879 - DNA, 50 bp, synthetic construct
  source 1..50: mol_type = other DNA
cgttacttttctttgcgccatgctttacgataccccaattaaactgccgc

SEQ ID NO: 65880 - DNA, 50 bp, synthetic construct
  source 1..50: mol_type = other DNA
gatatatccgagaataatgtgccgaagggacagtatctccatctcatttc

SEQ ID NO: 65881 - DNA, 50 bp, synthetic construct
  source 1..50: mol_type = other DNA
aacataataaaaacaccccgcgaaatgctagggcaaaaaaataacgtcaa

SEQ ID NO: 65882 - DNA, 50 bp, synthetic construct
  source 1..50: mol_type = other DNA
gagagaccttcatcatttccaaaatattttgaagatgaaggcattgagct

SEQ ID NO: 65883 - DNA, 50 bp, synthetic construct
  source 1..50: mol_type = other DNA
tactttcctgttgacgcccaatatttagatgacagattacaagtttataa

SEQ ID NO: 65884 - DNA, 50 bp, synthetic construct
  source 1..50: mol_type = other DNA
ggctatatagtcaagccatctgtggcagaagatggattaccgatggagcg

SEQ ID NO: 65885 - DNA, 50 bp, synthetic construct
  source 1..50: mol_type = other DNA
tatagattgctattttcataataaaagacttacagaaattagtatctgag

SEQ ID NO: 65886 - DNA, 50 bp, synthetic construct
  source 1..50: mol_type = other DNA
ggcagcaatcacagcgtccatcatcggtctgagacgctgccatcgctgcc

SEQ ID NO: 65887 - DNA, 50 bp, synthetic construct
  source 1..50: mol_type = other DNA
gaacagttcagtagaagaaaaaaatatttatcacccctacgaaattgtaa

SEQ ID NO: 65888 - DNA, 50 bp, synthetic construct
  source 1..50: mol_type = other DNA
atgaagaagaggacgaaatgttatatataccacttagatttgcatttatt

SEQ ID NO: 65889 - DNA, 50 bp, synthetic construct
  source 1..50: mol_type = other DNA
aaaaatattggagagagacaaaaggaggaaatgatcatagaggcattgaa

SEQ ID NO: 65890 - DNA, 50 bp, synthetic construct
  source 1..50: mol_type = other DNA
ttccggaataagggcaatctctaaatctgtaggttgcccttatttgttct

SEQ ID NO: 65891 - DNA, 50 bp, synthetic construct
  source 1..50: mol_type = other DNA
atcagctgacacaggggctaacaaagcacgttcgccccgttccagttgtc

SEQ ID NO: 65892 - DNA, 50 bp, synthetic construct
  source 1..50: mol_type = other DNA
ggtcttccgtgctctgctcccagctcgccgacaccggcatacccaagagt

SEQ ID NO: 65893 - DNA, 50 bp, synthetic construct
  source 1..50: mol_type = other DNA
gggtgatagcataatattttatagtactataaaaaataaagttatgaaaa

SEQ ID NO: 65894 - DNA, 50 bp, synthetic construct
  source 1..50: mol_type = other DNA
tgacactgaaggaaaggatgtgacgaagcacattcttgagtttcttgtta

SEQ ID NO: 65895 - DNA, 50 bp, synthetic construct
  source 1..50: mol_type = other DNA
cgacagctgatgcgtcacgttgatgacattcagtccgtcagcaactgtct

SEQ ID NO: 65896 - DNA, 50 bp, synthetic construct
  source 1..50: mol_type = other DNA
tactgccgtcattgacaagcctgctgaggacctgttcgatgaagatttac

SEQ ID NO: 65897 - DNA, 50 bp, synthetic construct
  source 1..50: mol_type = other DNA
ataatcgcactttcaatctcatatttatatgaaagacggtgttgccttac

SEQ ID NO: 65898 - DNA, 50 bp, synthetic construct
  source 1..50: mol_type = other DNA
cgtacttatctcggcggtcggcaagcttggaggaggccgagaatatgcta

SEQ ID NO: 65899 - DNA, 50 bp, synthetic construct
  source 1..50: mol_type = other DNA
aacggcagcaagcccttgcgtggctgggtgacgaatgaagtgctatcggc

SEQ ID NO: 65900 - DNA, 50 bp, synthetic construct
  source 1..50: mol_type = other DNA
aagaacaccgtctgttgccattttgatataaggcaatgaatgttgttcta

SEQ ID NO: 65901 - DNA, 50 bp, synthetic construct
  source 1..50: mol_type = other DNA
ggatttttattatgttgaactgattgctcacaagtacataacaaacgaaa

SEQ ID NO: 65902 - DNA, 50 bp, synthetic construct
  source 1..50: mol_type = other DNA
ttttttctaaaaaagggtataaaaattattttatagagaaagcgaaagaa

SEQ ID NO: 65903 - DNA, 50 bp, synthetic construct
  source 1..50: mol_type = other DNA
tatactcgtgcttatcaagatgaaggatcatcttgtctgggttcgagccc

SEQ ID NO: 65904 - DNA, 50 bp, synthetic construct
  source 1..50: mol_type = other DNA
aaaagaaggttgccggatacgcacgaatcggaatcatacggccatctttg

SEQ ID NO: 65905 - DNA, 50 bp, synthetic construct
  source 1..50: mol_type = other DNA
atggcgaaaaacatagccgatttcagagtatccgcagacattgaccgggt

SEQ ID NO: 65906 - DNA, 50 bp, synthetic construct
  source 1..50: mol_type = other DNA
cattgccgtcaacctcctgcggcttattatgcgtaataactacggcattg

SEQ ID NO: 65907 - DNA, 50 bp, synthetic construct
  source 1..50: mol_type = other DNA
gaaagattgctcttgacctttttcaggggtgattacaagcagattcttat

SEQ ID NO: 65908 - DNA, 50 bp, synthetic construct
  source 1..50: mol_type = other DNA
ccgcaacgctgtcaaagttgctgccgaatactgtgccgacagcgttggct

SEQ ID NO: 65909 - DNA, 50 bp, synthetic construct
  source 1..50: mol_type = other DNA
caaagaaaaatcctgacttcccggctcccggaaatcccttattttctaca

SEQ ID NO: 65910 - DNA, 50 bp, synthetic construct
  source 1..50: mol_type = other DNA
cgaaagatatggacaatatcctccggagaggacggccgtcatagttttgt

SEQ ID NO: 65911 - DNA, 50 bp, synthetic construct
  source 1..50: mol_type = other DNA
gggttattgcctcgcttcttgttgaaggacaggaggcgagacaatgaaac

SEQ ID NO: 65912 - DNA, 50 bp, synthetic construct
  source 1..50: mol_type = other DNA
atttcggaaatgaatggaggcgaagaaacagacacagaaatttaccgacc

SEQ ID NO: 65913 - DNA, 50 bp, synthetic construct
  source 1..50: mol_type = other DNA
gtttgtggcggcaagtttctttgtcaacaatgaatttttttgtaacaaaa

SEQ ID NO: 65914 - DNA, 50 bp, synthetic construct
  source 1..50: mol_type = other DNA
gacatattcccgtactatcgcagaaatctccgaattgccgtgttccattc

SEQ ID NO: 65915 - DNA, 50 bp, synthetic construct
  source 1..50: mol_type = other DNA
taaataaaggctttgtgatgatattaattatgataaggccttattttata

SEQ ID NO: 65916 - DNA, 50 bp, synthetic construct
  source 1..50: mol_type = other DNA
tacggatacacaatgcgcaatggtagcccgctgaaaattgtgtataaggt

SEQ ID NO: 65917 - DNA, 50 bp, synthetic construct
  source 1..50: mol_type = other DNA
tgcctatagtgtcacacaacggggcgccctcgcctcatacatcacactcg

SEQ ID NO: 65918 - DNA, 50 bp, synthetic construct
  source 1..50: mol_type = other DNA
cggctttttgtaattaaaaatataagctccctcaaaaatacaaagggcgt

SEQ ID NO: 65919 - DNA, 50 bp, synthetic construct
  source 1..50: mol_type = other DNA
tgatcggcatgtactatatcgagcagcatcgatatattatctctctataa

SEQ ID NO: 65920 - DNA, 50 bp, synthetic construct
  source 1..50: mol_type = other DNA
tgaaagcgaggtaaactaatgggaaatcccttgatatgtagtcgctttag

SEQ ID NO: 65921 - DNA, 50 bp, synthetic construct
  source 1..50: mol_type = other DNA
tcttgcgtaaataaaatcttccatcgatggataatttgattttcagccat

SEQ ID NO: 65922 - DNA, 50 bp, synthetic construct
  source 1..50: mol_type = other DNA
tctgccttcggtggcagcacggaaaagtcgcttctgaagccgacaatgat

SEQ ID NO: 65923 - DNA, 50 bp, synthetic construct
  source 1..50: mol_type = other DNA
ggtcttgaggaataattaaaaaatgcacaggcattttaccatcgcagaaa

SEQ ID NO: 65924 - DNA, 50 bp, synthetic construct
  source 1..50: mol_type = other DNA
gcaagcaaaaaaaggaaaacacacccgtgctgttgcctttcaaagcgata

SEQ ID NO: 65925 - DNA, 50 bp, synthetic construct
  source 1..50: mol_type = other DNA
taaataagggtattaactttttttagcaaaaaatataataagccaatatg

SEQ ID NO: 65926 - DNA, 50 bp, synthetic construct
  source 1..50: mol_type = other DNA
gttctggcggtctatcattcaggaaaggtgatatgatatgacgactaaag

SEQ ID NO: 65927 - DNA, 50 bp, synthetic construct
  source 1..50: mol_type = other DNA
accggcgacgctgtcacgcttcacggagattgccggaggaattgaccggt

SEQ ID NO: 65928 - DNA, 50 bp, synthetic construct
  source 1..50: mol_type = other DNA
caaaggggatgttgttttcctcacaaggagcgaaaagaaatggccaaatc

SEQ ID NO: 65929 - DNA, 50 bp, synthetic construct
  source 1..50: mol_type = other DNA
gacgttatatatgaaaagtgatataaataaggcttattttatatataata

SEQ ID NO: 65930 - DNA, 50 bp, synthetic construct
  source 1..50: mol_type = other DNA
aatcgtgttcggcgcaaagattcccttccttctccattatgctgccctcc

SEQ ID NO: 65931 - DNA, 50 bp, synthetic construct
  source 1..50: mol_type = other DNA
gctctataccttcagcggtagttgcgccgctgttactgctggcatttggc

SEQ ID NO: 65932 - DNA, 50 bp, synthetic construct
  source 1..50: mol_type = other DNA
taaggtctccaatatgttttttattaaatacaattatataggagtgtgat

SEQ ID NO: 65933 - DNA, 50 bp, synthetic construct
  source 1..50: mol_type = other DNA
aatttccatctcaaagatggattaattatatcatgctttatatgcaaatt

SEQ ID NO: 65934 - DNA, 50 bp, synthetic construct
  source 1..50: mol_type = other DNA
ttttatataaatggacgatactgaggttggcattgtccatgccaatcaaa

SEQ ID NO: 65935 - DNA, 50 bp, synthetic construct
  source 1..50: mol_type = other DNA
tttgtgacacaaacattaccacacttgttcatgcgttgttggctccaaat

SEQ ID NO: 65936 - DNA, 50 bp, synthetic construct
  source 1..50: mol_type = other DNA
aggcaaacatgatataatacaaacatatttccatcatatcatcttctccg

SEQ ID NO: 65937 - DNA, 50 bp, synthetic construct
  source 1..50: mol_type = other DNA
cacaccttgacaatataatatacttaagtacattatatctattcatatac

SEQ ID NO: 65938 - DNA, 50 bp, synthetic construct
  source 1..50: mol_type = other DNA
cgctcacagctccattagtatacccgggtaaatgctgactccttggagta

SEQ ID NO: 65939 - DNA, 50 bp, synthetic construct
  source 1..50: mol_type = other DNA
atcgaatgacacatcttgaaataccctactttcgttatggatcatccgat

SEQ ID NO: 65940 - DNA, 50 bp, synthetic construct
  source 1..50: mol_type = other DNA
caatgatgaaaaaatgaactatgttcccgacattcatgccggtatcattt

SEQ ID NO: 65941 - DNA, 50 bp, synthetic construct
  source 1..50: mol_type = other DNA
ccctcgactttctttcttctcatatatttgtgacgaaagtgttaataaga

SEQ ID NO: 65942 - DNA, 50 bp, synthetic construct
  source 1..50: mol_type = other DNA
aataaatcacttataataagtgtaataattctttttataaaaagaggtaa

SEQ ID NO: 65943 - DNA, 50 bp, synthetic construct
  source 1..50: mol_type = other DNA
gctgggcatcatccaaaattgcacttttgatgtgggtggtgatggataat

SEQ ID NO: 65944 - DNA, 50 bp, synthetic construct
  source 1..50: mol_type = other DNA
ttgaaatcagttcggaatattacagcctgcagcgggtatactaatggagc

SEQ ID NO: 65945 - DNA, 50 bp, synthetic construct
  source 1..50: mol_type = other DNA
cggtgattatcaaatgtgcaaaatcatgccgatacagtagttaatccgca

SEQ ID NO: 65946 - DNA, 50 bp, synthetic construct
  source 1..50: mol_type = other DNA
ggcttatacggtccagtttgtacacgtatttaaactcatccaaacatcgg

SEQ ID NO: 65947 - DNA, 50 bp, synthetic construct
  source 1..50: mol_type = other DNA
aatgtgctaataacaatatttaatttaattcttatttacattttaatatt

SEQ ID NO: 65948 - DNA, 50 bp, synthetic construct
  source 1..50: mol_type = other DNA
gataactgcctttgtctgcatctttgcataacacatcaaaaagagggtgt

SEQ ID NO: 65949 - DNA, 50 bp, synthetic construct
  source 1..50: mol_type = other DNA
tttgcttttgtttcctttaccttatacaaggcaaatcacaaaaaatcaac

SEQ ID NO: 65950 - DNA, 50 bp, synthetic construct
  source 1..50: mol_type = other DNA
ttcaattgtataagtatagcccccttggcattggtacctatacattattc

SEQ ID NO: 65951 - DNA, 50 bp, synthetic construct
  source 1..50: mol_type = other DNA
tatacctatatatttttttttttttcttgcgtaaaaaaataatgccccat

SEQ ID NO: 65952 - DNA, 50 bp, synthetic construct
  source 1..50: mol_type = other DNA
acatgactgtaaaagttcctgattataatcagccgattttcaaaaaggag

SEQ ID NO: 65953 - DNA, 50 bp, synthetic construct
  source 1..50: mol_type = other DNA
tactaaactttattctccgagtatatatttcaggcccgtattgtttacgg

SEQ ID NO: 65954 - DNA, 50 bp, synthetic construct
  source 1..50: mol_type = other DNA
ttcagcgtgaggacaatgcaaaaatatctttgcaccatcaaaacaaagaa

SEQ ID NO: 65955 - DNA, 50 bp, synthetic construct
  source 1..50: mol_type = other DNA
actggtaaaattttaacgttttggtataatatagttgtaaggttggtagc

SEQ ID NO: 65956 - DNA, 50 bp, synthetic construct
  source 1..50: mol_type = other DNA
cataatgaaagcattttgctacaatattataagagtaaaaaaatatcaag

SEQ ID NO: 65957 - DNA, 50 bp, synthetic construct
  source 1..50: mol_type = other DNA
ctccttcctgatctgcttcattttctccaagtttgccgaacaggaaggca

SEQ ID NO: 65958 - DNA, 50 bp, synthetic construct
  source 1..50: mol_type = other DNA
cccagcgtccaaacgtcaccctcctgcgatgctcggcaatgggcgcttcc

SEQ ID NO: 65959 - DNA, 50 bp, synthetic construct
  source 1..50: mol_type = other DNA
taatgaaaaaaccgcgcaatattacatatttgtgccatattttcctgaca

SEQ ID NO: 65960 - DNA, 50 bp, synthetic construct
  source 1..50: mol_type = other DNA
ccattattccaaaattaggagagaagtaaagatagatttttatataatgg

SEQ ID NO: 65961 - DNA, 50 bp, synthetic construct
  source 1..50: mol_type = other DNA
tatagttatcatgtttagccatactcattaggataaacaggataactata

SEQ ID NO: 65962 - DNA, 50 bp, synthetic construct
  source 1..50: mol_type = other DNA
tatagactttctaaaacaaataaaatttattagaaagtaggtatttctat

SEQ ID NO: 65963 - DNA, 50 bp, synthetic construct
  source 1..50: mol_type = other DNA
aatcgaactcacggcctcttgaacccgttctcacctgtgttccttccggg

SEQ ID NO: 65964 - DNA, 50 bp, synthetic construct
  source 1..50: mol_type = other DNA
tgccgactaacacagaccggcacaaatgtgcttttcatgtgttattcctc

SEQ ID NO: 65965 - DNA, 50 bp, synthetic construct
  source 1..50: mol_type = other DNA
cacagaccggcacaaatgaaagaagctgcttctttttcttcttttctgtc

SEQ ID NO: 65966 - DNA, 50 bp, synthetic construct
  source 1..50: mol_type = other DNA
atgccattttttacagaacgcagagtgatatatagactacccaaagagaa

SEQ ID NO: 65967 - DNA, 50 bp, synthetic construct
  source 1..50: mol_type = other DNA
tcctgtggatacaataaccgttatggattccggataccatcataaaggga

SEQ ID NO: 65968 - DNA, 50 bp, synthetic construct
  source 1..50: mol_type = other DNA
gtttgaacagcaaaaatatatcacaattggcttattctgataattctgaa

SEQ ID NO: 65969 - DNA, 50 bp, synthetic construct
  source 1..50: mol_type = other DNA
aattctatgccgttacgctttgcctcccacatctgaaaaataattgaata

SEQ ID NO: 65970 - DNA, 50 bp, synthetic construct
  source 1..50: mol_type = other DNA
ttatgaccgaaactgaaaagaggatgcggtcttacccgtttcggtgcggt

SEQ ID NO: 65971 - DNA, 50 bp, synthetic construct
  source 1..50: mol_type = other DNA
cggagaaaaaagtggaactaaaaataactttaggcattctggttcctcct

SEQ ID NO: 65972 - DNA, 50 bp, synthetic construct
  source 1..50: mol_type = other DNA
ctctggagtttcatagggattactcaccgatatccgatgaaacactgttg

SEQ ID NO: 65973 - DNA, 50 bp, synthetic construct
  source 1..50: mol_type = other DNA
gaaggggctcaaaaccatcgacgacgggttcgactcccgtcagctccacc

SEQ ID NO: 65974 - DNA, 50 bp, synthetic construct
  source 1..50: mol_type = other DNA
ctataggctatcgcaatgccgtcaaactggggcattcagaggtaatatgt

SEQ ID NO: 65975 - DNA, 50 bp, synthetic construct
  source 1..50: mol_type = other DNA
aattacggttctttgccaaaaaggcaagaaggaggcaaaaatcatgaaca

SEQ ID NO: 65976 - DNA, 50 bp, synthetic construct
  source 1..50: mol_type = other DNA
gccgtataaaggcggtgtccatattcctatatgcacttccttttacgcgc

SEQ ID NO: 65977 - DNA, 50 bp, synthetic construct
  source 1..50: mol_type = other DNA
cgaagaggacattaaactgcagttcaccctgcagtatgctgctaatcgaa

SEQ ID NO: 65978 - DNA, 50 bp, synthetic construct
  source 1..50: mol_type = other DNA
ttaacattcttttttgcaaaaatttaatattttcaacaacagtataacaa

SEQ ID NO: 65979 - DNA, 50 bp, synthetic construct
  source 1..50: mol_type = other DNA
aagttttttctcctttgcggttatgcaaaagacagcataagaaaaaggct

SEQ ID NO: 65980 - DNA, 50 bp, synthetic construct
  source 1..50: mol_type = other DNA
gcattattttgcgccgcagggggaaagaccgctccagagcagaaagttgg

SEQ ID NO: 65981 - DNA, 50 bp, synthetic construct
  source 1..50: mol_type = other DNA
gtgtcggctttgttgttatcattttaaattgattatgcaaaagttgacac

SEQ ID NO: 65982 - DNA, 50 bp, synthetic construct
  source 1..50: mol_type = other DNA
taaaaaaataccttctttctaaaattttgggtgtgttatttatttttttt

SEQ ID NO: 65983 - DNA, 50 bp, synthetic construct
  source 1..50: mol_type = other DNA
tcatattatttttttgtgattgttatgaaaatctctgttattttttacgt

SEQ ID NO: 65984 - DNA, 50 bp, synthetic construct
  source 1..50: mol_type = other DNA
tgaaagtcccttttgaaattaggcggacctaaatacaaaagggacttaca

SEQ ID NO: 65985 - DNA, 50 bp, synthetic construct
  source 1..50: mol_type = other DNA
gagggactattttggcatgcgcacatttcagcataacaaaagctgccctg

SEQ ID NO: 65986 - DNA, 50 bp, synthetic construct
  source 1..50: mol_type = other DNA
ctgtatctcacagcaactcctcgggaacgatgtcattaagtttctgcggg

SEQ ID NO: 65987 - DNA, 50 bp, synthetic construct
  source 1..50: mol_type = other DNA
ttccctcctcctttgcatttgttttatacacgaaaaaaagggcggccgaa

SEQ ID NO: 65988 - DNA, 50 bp, synthetic construct
  source 1..50: mol_type = other DNA
ttcacaattatcgctcataataaccatttattactcgcgcaaacgaggac

SEQ ID NO: 65989 - DNA, 50 bp, synthetic construct
  source 1..50: mol_type = other DNA
aaggacagagagcgtgcggaaaatgagtcctctggtatctttacccccgc

SEQ ID NO: 65990 - DNA, 50 bp, synthetic construct
  source 1..50: mol_type = other DNA
tgagatttttttggggggtgaaaaatgggcagcccgggaacaaagtcggg

SEQ ID NO: 65991 - DNA, 50 bp, synthetic construct
  source 1..50: mol_type = other DNA
aaaaaatttctaactcattttctcgccaagaccgctcttgactatctttt

SEQ ID NO: 65992 - DNA, 50 bp, synthetic construct
  source 1..50: mol_type = other DNA
ttgctcacggcatacgccgggtcagccgaggtcgctgaaaacggacgcac

SEQ ID NO: 65993 - DNA, 50 bp, synthetic construct
  source 1..50: mol_type = other DNA
tagaaagcccctttcattattctataccatttaacgaaaggtctgtgggg

SEQ ID NO: 65994 - DNA, 50 bp, synthetic construct
  source 1..50: mol_type = other DNA
acacgaagatattccaaattcctctcgaatctggtgtccagtttcttttt

SEQ ID NO: 65995 - DNA, 50 bp, synthetic construct
  source 1..50: mol_type = other DNA
ttggattatcaaaattttcagttatggaatagatgatataaataatattt

SEQ ID NO: 65996 - DNA, 50 bp, synthetic construct
  source 1..50: mol_type = other DNA
acaaagccgacctgaccgttggtggaaacctgcggtcttttcatttttgt

SEQ ID NO: 65997 - DNA, 50 bp, synthetic construct
  source 1..50: mol_type = other DNA
cgcagatgagaaactggtcggtagtgactgtgaccgaccgtgctgctgtt

SEQ ID NO: 65998 - DNA, 50 bp, synthetic construct
  source 1..50: mol_type = other DNA
taaaaattagaaacgcgcctcttctggcgcagagcgcgttgtaattttca

SEQ ID NO: 65999 - DNA, 50 bp, synthetic construct
  source 1..50: mol_type = other DNA
tgccgtaaagattccagtgatcccatgatcatacgggaacctttaccctg

SEQ ID NO: 66000 - DNA, 50 bp, synthetic construct
  source 1..50: mol_type = other DNA
ttgtaattgatagttatgatgattttgcaagtattatccttcaatgtcaa

SEQ ID NO: 66001 - DNA, 50 bp, synthetic construct
  source 1..50: mol_type = other DNA
aacggctttgtaacgaccgacgatgcagtgccttcgtcaacaacagcctt

SEQ ID NO: 66002 - DNA, 50 bp, synthetic construct
  source 1..50: mol_type = other DNA
aagaactaaggcgctgtatgagaaattttacataaaggaggattgacaat

SEQ ID NO: 66003 - DNA, 50 bp, synthetic construct
  source 1..50: mol_type = other DNA
ttgtaaactatttggtaaacaatgtggatatgtttccaaacacggttcat

SEQ ID NO: 66004 - DNA, 50 bp, synthetic construct
  source 1..50: mol_type = other DNA
tgcggcaattatttgaaaactacatcagttcttcgaaaatatatcccatc

SEQ ID NO: 66005 - DNA, 50 bp, synthetic construct
  source 1..50: mol_type = other DNA
tcttcaccagcgccgccgtgaaatctatttgagagcgcttctgattattt

SEQ ID NO: 66006 - DNA, 50 bp, synthetic construct
  source 1..50: mol_type = other DNA
tgcaaaaccataattagaattgtttaaataaagataattatatattgtca

SEQ ID NO: 66007 - DNA, 50 bp, synthetic construct
  source 1..50: mol_type = other DNA
tgcttttttttaaaaaacatgttattatacactttttttaatatttttta

SEQ ID NO: 66008 - DNA, 50 bp, synthetic construct
  source 1..50: mol_type = other DNA
ttttattcgcatgggtgtacccacctgtccgtgcagaaatccgcatagga

SEQ ID NO: 66009 - DNA, 50 bp, synthetic construct
  source 1..50: mol_type = other DNA
gagaaaatagaatggaaagaatacattcatcgttttgaaaacatttatat

SEQ ID NO: 66010 - DNA, 50 bp, synthetic construct
  source 1..50: mol_type = other DNA
acagcgttcattgacataatcaatcaaaaaaccccttgcatttttccgag

SEQ ID NO: 66011 - DNA, 50 bp, synthetic construct
  source 1..50: mol_type = other DNA
agtaatcgagttcttatcgacttcccgaagcagagatagaaataattaca

SEQ ID NO: 66012 - DNA, 50 bp, synthetic construct
  source 1..50: mol_type = other DNA
cgcttccgcaaaatcatagatttcacgcttgctgctgaacagcagaaagt

SEQ ID NO: 66013 - DNA, 50 bp, synthetic construct
  source 1..50: mol_type = other DNA
ttaaatagtataaacgaactctcttaagagagttccagtagggtatgtgt

SEQ ID NO: 66014 - DNA, 50 bp, synthetic construct
  source 1..50: mol_type = other DNA
ctctgcggcttgctgacgcatgtcgggacaagtatcagaaacgccgtccg

SEQ ID NO: 66015 - DNA, 50 bp, synthetic construct
  source 1..50: mol_type = other DNA
attttcccaacgttctatcccttttatcacgggcagcaatgcaggaaagc

SEQ ID NO: 66016 - DNA, 50 bp, synthetic construct
  source 1..50: mol_type = other DNA
cataccggactggaaattgtagaccggttcgatcattttgtgccacaatg

SEQ ID NO: 66017 - DNA, 50 bp, synthetic construct
  source 1..50: mol_type = other DNA
gtgccgagcagcaggctcagcttcagaaaatgaagagacgcgcttgcggc

SEQ ID NO: 66018 - DNA, 50 bp, synthetic construct
  source 1..50: mol_type = other DNA
tcccgtttgtatattctttcgttgccgaccgaaaatacgtacccgtagct

SEQ ID NO: 66019 - DNA, 50 bp, synthetic construct
  source 1..50: mol_type = other DNA
ggtatctcttgaatattcatttcttataaaactccgccgcgtgtgtcttt

SEQ ID NO: 66020 - DNA, 50 bp, synthetic construct
  source 1..50: mol_type = other DNA
gccttgatagcattgatggttttcgttccaatcataaatgctttcggtgc

SEQ ID NO: 66021 - DNA, 50 bp, synthetic construct
  source 1..50: mol_type = other DNA
cgggagaaaaataatgtgccggtgcttttcggcacattattctccgaaat

SEQ ID NO: 66022 - DNA, 50 bp, synthetic construct
  source 1..50: mol_type = other DNA
aggtaatcattgaaaatgcatttgtggaaaattgatttttttattgtgta

SEQ ID NO: 66023 - DNA, 50 bp, synthetic construct
  source 1..50: mol_type = other DNA
cttattatcctgtggctctacttagctacaagccgagtaaggataaaaag

SEQ ID NO: 66024 - DNA, 50 bp, synthetic construct
  source 1..50: mol_type = other DNA
aaatatatgaaaaatgggtataaaaaagtaatcagatacgtttgatatgc

SEQ ID NO: 66025 - DNA, 50 bp, synthetic construct
  source 1..50: mol_type = other DNA
cttttctgcatccagtgggcatcaatttcttcaggcttaacgccataatt

SEQ ID NO: 66026 - DNA, 50 bp, synthetic construct
  source 1..50: mol_type = other DNA
ttatcaagttattcaaacgataaataaatcttatctttccatccttttaa

SEQ ID NO: 66027 - DNA, 50 bp, synthetic construct
  source 1..50: mol_type = other DNA
taccggttaaagccttcatttctaaagaaaatacaagccaataataggtt

SEQ ID NO: 66028 - DNA, 50 bp, synthetic construct
  source 1..50: mol_type = other DNA
taagataacgccctctatgaaaaaggcataccataacaggcaagagctac

SEQ ID NO: 66029 - DNA, 50 bp, synthetic construct
  source 1..50: mol_type = other DNA
atatatcactctaaaaggccggaatattcgggatgcttagagcgaataag

SEQ ID NO: 66030 - DNA, 50 bp, synthetic construct
  source 1..50: mol_type = other DNA
ttgatttttaagtgataataaattatcatatatgttcacccacttctaaa

SEQ ID NO: 66031 - DNA, 50 bp, synthetic construct
  source 1..50: mol_type = other DNA
caaatataaacaagcttataaagatttcttttacaaccgaggggaaattt

SEQ ID NO: 66032 - DNA, 50 bp, synthetic construct
  source 1..50: mol_type = other DNA
tccggtttctttcatcttttcttgttcaatgtgagctgaaaagcatcgtc

SEQ ID NO: 66033 - DNA, 50 bp, synthetic construct
  source 1..50: mol_type = other DNA
ccatagtatgaaagccgtccttgctggcaccaccagctgccgtacgctgg

SEQ ID NO: 66034 - DNA, 50 bp, synthetic construct
  source 1..50: mol_type = other DNA
gatcttcatagtgttgctctgccgctgatgagagtaagctggtggagata

SEQ ID NO: 66035 - DNA, 50 bp, synthetic construct
  source 1..50: mol_type = other DNA
cgtgtgtcaacggatcaggaagaccaatggttcagtgccgtgtggacaca

SEQ ID NO: 66036 - DNA, 50 bp, synthetic construct
  source 1..50: mol_type = other DNA
tctctgcccgtgagcggtcctgccatggttttaccgcacaggcgcaggac

SEQ ID NO: 66037 - DNA, 50 bp, synthetic construct
  source 1..50: mol_type = other DNA
cgccagctaattcgcctactttatctgcgtatgcagcgccttcgttgccg

SEQ ID NO: 66038 - DNA, 50 bp, synthetic construct
  source 1..50: mol_type = other DNA
tgcgcttttgagaccgcgtttccgtccgcaatatcgctggataatatctg

SEQ ID NO: 66039 - DNA, 50 bp, synthetic construct
  source 1..50: mol_type = other DNA
agaacctcaggtgccttatttttttggaaaaataaatcacgctctcaatc

SEQ ID NO: 66040 - DNA, 50 bp, synthetic construct
  source 1..50: mol_type = other DNA
attcttctcatcctttctctgaatataatcaaagatagtcttggactgaa

SEQ ID NO: 66041 - DNA, 50 bp, synthetic construct
  source 1..50: mol_type = other DNA
caaagtaattatacctataacacaaagcagagatagaaataattacaagg

SEQ ID NO: 66042 - DNA, 50 bp, synthetic construct
  source 1..50: mol_type = other DNA
gcatcagtaaaaagggatatgcagagggcaagtggataatatgcagaaag

SEQ ID NO: 66043 - DNA, 50 bp, synthetic construct
  source 1..50: mol_type = other DNA
gaatttaagaataaaagagaagagatcggctctctttgtgattatgataa

SEQ ID NO: 66044 - DNA, 50 bp, synthetic construct
  source 1..50: mol_type = other DNA
actgaataaggattttctctgttatgttatttaaagttaccttatacttc

SEQ ID NO: 66045 - DNA, 50 bp, synthetic construct
  source 1..50: mol_type = other DNA
aggctccagcaaaggcgctatctatatccgaagggcaggtatcttttctt

SEQ ID NO: 66046 - DNA, 50 bp, synthetic construct
  source 1..50: mol_type = other DNA
caaacgaaaagaaacattgccatttgaaagcggatattccaccggctttg

SEQ ID NO: 66047 - DNA, 50 bp, synthetic construct
  source 1..50: mol_type = other DNA
ccgcgcacaaaataaccctaacgaattcattacataacctttttgacaac

SEQ ID NO: 66048 - DNA, 50 bp, synthetic construct
  source 1..50: mol_type = other DNA
tcaggtccgctgacaacataaacaattgtagttattttcaattcaaaaga

SEQ ID NO: 66049 - DNA, 50 bp, synthetic construct
  source 1..50: mol_type = other DNA
aaacgatcaaatacgaatggcgctatatagccattgggatgaagcatggt

SEQ ID NO: 66050 - DNA, 50 bp, synthetic construct
  source 1..50: mol_type = other DNA
ttgccattcttatcatcctttctccgtgcggtcgatgacctgaaacggaa

SEQ ID NO: 66051 - DNA, 50 bp, synthetic construct
  source 1..50: mol_type = other DNA
atacctttcacctttctttccttggccaagggaagaaaagtacctggaag

SEQ ID NO: 66052 - DNA, 50 bp, synthetic construct
  source 1..50: mol_type = other DNA
taaacgggctgaatcgctttctgagctcacgcatttttattgcctgttta

SEQ ID NO: 66053 - DNA, 50 bp, synthetic construct
  source 1..50: mol_type = other DNA
ggaacggtcatgccactgccttacggaaaagcggacggaatgtccgcttt

SEQ ID NO: 66054 - DNA, 50 bp, synthetic construct
  source 1..50: mol_type = other DNA
acggaaccatgccgtcccttacggtacggtaacggttttagccattccgg

SEQ ID NO: 66055 - DNA, 50 bp, synthetic construct
  source 1..50: mol_type = other DNA
tcttagccgcttgaccatagcgccatggttataaaaccaagcgtggtgga

SEQ ID NO: 66056 - DNA, 50 bp, synthetic construct
  source 1..50: mol_type = other DNA
aaattacttattttttactttacatttaagtgcaaaaaaattaaaaacga

SEQ ID NO: 66057 - DNA, 50 bp, synthetic construct
  source 1..50: mol_type = other DNA
tgttgtactaactgaacactacccgtgggctgtgttaagttagtacaaaa

SEQ ID NO: 66058 - DNA, 50 bp, synthetic construct
  source 1..50: mol_type = other DNA
gtgccgggcgaggatgtggaggttataacctccggcattgcgcctaccaa

SEQ ID NO: 66059 - DNA, 50 bp, synthetic construct
  source 1..50: mol_type = other DNA
ccaaaatcttagcaatagcatttagctggttctttttgctcttttgttgg

SEQ ID NO: 66060 - DNA, 50 bp, synthetic construct
  source 1..50: mol_type = other DNA
acctcccaaaaaagagtataaaaaattttttatgagaaatttggatgtgt

SEQ ID NO: 66061 - DNA, 50 bp, synthetic construct
  source 1..50: mol_type = other DNA
tgcggagaaaagcttttcagaaaaacctttctgaaaagatttgtggtatc

SEQ ID NO: 66062 - DNA, 50 bp, synthetic construct
  source 1..50: mol_type = other DNA
aatacttaatttttgaaattttttcggagcttacccaaaaatcgaatatg

SEQ ID NO: 66063 - DNA, 50 bp, synthetic construct
  source 1..50: mol_type = other DNA
ttgtcaatatataatttacattttataaaatgtaccttgaaaatcaaata

SEQ ID NO: 66064 - DNA, 50 bp, synthetic construct
  source 1..50: mol_type = other DNA
ctatacttaaatcactctaaaacacgataatcaacgagaagaaagtattg

SEQ ID NO: 66065 - DNA, 50 bp, synthetic construct
  source 1..50: mol_type = other DNA
tcgctgggtgctatctggggggatggctcgcaggagatttccatgcgcga

SEQ ID NO: 66066 - DNA, 50 bp, synthetic construct
  source 1..50: mol_type = other DNA
tgggttttgccatatcatatttactttggaatattctaccgcaagcttca

SEQ ID NO: 66067 - DNA, 50 bp, synthetic construct
  source 1..50: mol_type = other DNA
gtcattctcttaagggcacagatagtaatctgcgtactgcatagcctgat

SEQ ID NO: 66068 - DNA, 50 bp, synthetic construct
  source 1..50: mol_type = other DNA
ttttttacgtttataatttccaacatgttggatattaataatagtcttga

SEQ ID NO: 66069 - DNA, 50 bp, synthetic construct
  source 1..50: mol_type = other DNA
ctaaaaatttcgtcgttatggtactcggcagataccgacgaaactgctca

SEQ ID NO: 66070 - DNA, 50 bp, synthetic construct
  source 1..50: mol_type = other DNA
gattgcaggaaatcataactatcctggtatgtgtgccatttcaatcaatc

SEQ ID NO: 66071 - DNA, 50 bp, synthetic construct
  source 1..50: mol_type = other DNA
ccaattccagttttttcaaaatgtgcactttctgaaaaaaagtttacgag

SEQ ID NO: 66072 - DNA, 50 bp, synthetic construct
  source 1..50: mol_type = other DNA
gctttctggattgctcagatgcaaatatgagtacaagcaatactggctgc

SEQ ID NO: 66073 - DNA, 50 bp, synthetic construct
  source 1..50: mol_type = other DNA
gcgacagtcatcgcaaatgagaaaatacagcatatttagagaattgtcaa

SEQ ID NO: 66074 - DNA, 50 bp, synthetic construct
  source 1..50: mol_type = other DNA
tcctgccgggatgccgttttcgcaggtgcgtcagcggattgatggtcggc

SEQ ID NO: 66075 - DNA, 50 bp, synthetic construct
  source 1..50: mol_type = other DNA
tcattcacggcggaagcgcttttcaccataagcgcttccgccgccttttc

SEQ ID NO: 66076 - DNA, 50 bp, synthetic construct
  source 1..50: mol_type = other DNA
aataaacccgctccaccctttcgggccggaaaaaccgactactggcgagg

SEQ ID NO: 66077 - DNA, 50 bp, synthetic construct
  source 1..50: mol_type = other DNA
atgggccaaatgggaaagaataaaattttaagatcacgcacaaaatagtc

SEQ ID NO: 66078 - DNA, 50 bp, synthetic construct
  source 1..50: mol_type = other DNA
gggtccgattcttctgaacctcaatctgaagaaaaagaacgatcagatgc

SEQ ID NO: 66079 - DNA, 50 bp, synthetic construct
  source 1..50: mol_type = other DNA
ttccacattttcttttccatagttgatctgaagaaaaagaacgatcagat

SEQ ID NO: 66080 - DNA, 50 bp, synthetic construct
  source 1..50: mol_type = other DNA
agaagataagggtggcagcctactgcagtgtgggaagccatttatttcct

SEQ ID NO: 66081 - DNA, 50 bp, synthetic construct
  source 1..50: mol_type = other DNA
agcagggtaaaggtttccgtgtagataagatagcagaccttatccccgct

SEQ ID NO: 66082 - DNA, 50 bp, synthetic construct
  source 1..50: mol_type = other DNA
atttttttgtgattgttatactactagtagtatgaaaatctctgttatta

SEQ ID NO: 66083 - DNA, 50 bp, synthetic construct
  source 1..50: mol_type = other DNA
ttggctacatccacgacatagtggtgccattactgcgggaaaaacgctat

SEQ ID NO: 66084 - DNA, 50 bp, synthetic construct
  source 1..50: mol_type = other DNA
atttaacgataaatactgtttgaaaattcagacagtcaattatgttggcg

SEQ ID NO: 66085 - DNA, 50 bp, synthetic construct
  source 1..50: mol_type = other DNA
tctcttgccatctcaatcttcctttccaagactgtaaagatggcaaaatc

SEQ ID NO: 66086 - DNA, 50 bp, synthetic construct
  source 1..50: mol_type = other DNA
caagcaataacggcgctatttctcgcacctttgtactccagtatagttga

SEQ ID NO: 66087 - DNA, 50 bp, synthetic construct
  source 1..50: mol_type = other DNA
cgaaaaaagttctaaaaatgagaaaattagcgtttttagaagatttttga

SEQ ID NO: 66088 - DNA, 50 bp, synthetic construct
  source 1..50: mol_type = other DNA
ccggaatggctaaaaccgttactgtaccgtgagggacggcacggttccgt

SEQ ID NO: 66089 - DNA, 50 bp, synthetic construct
  source 1..50: mol_type = other DNA
cgggtgcttcctcaccgtctatcccctgctctgcggagaggaacgcttcg

SEQ ID NO: 66090 - DNA, 50 bp, synthetic construct
  source 1..50: mol_type = other DNA
ttcttccaatagcagtgtcaagaacattctaaacaccgcttttgcaagta

SEQ ID NO: 66091 - DNA, 50 bp, synthetic construct
  source 1..50: mol_type = other DNA
atatatgtgaatgtggaaagaaatttatttcttttgtgattgttctctac

SEQ ID NO: 66092 - DNA, 50 bp, synthetic construct
  source 1..50: mol_type = other DNA
aataaaaaaactatcatttgatagttttgaaatctgatagtttttttggg

SEQ ID NO: 66093 - DNA, 50 bp, synthetic construct
  source 1..50: mol_type = other DNA
cggcacaaggcttttcggcaaagcgagctttgcgtcagagccttgcaaag

SEQ ID NO: 66094 - DNA, 50 bp, synthetic construct
  source 1..50: mol_type = other DNA
ctcagcagttccactaatacgatgctgatcttgcagaggcttctctggag

SEQ ID NO: 66095 - DNA, 50 bp, synthetic construct
  source 1..50: mol_type = other DNA
ctgcccacatgatcatgtaatccatatctccccaattatcatgggcacag

SEQ ID NO: 66096 - DNA, 50 bp, synthetic construct
  source 1..50: mol_type = other DNA
accttgcccgaaacgctgtggtgcgccaacatcatcgaatacggcaagag

SEQ ID NO: 66097 - DNA, 50 bp, synthetic construct
  source 1..50: mol_type = other DNA
cccacagggttcacggcctgtgggctttccctattcgtgaagggcagcta

SEQ ID NO: 66098 - DNA, 50 bp, synthetic construct
  source 1..50: mol_type = other DNA
agttacaaaattagcatagcgtctccaaccactatgctgtccgggtacat

SEQ ID NO: 66099 - DNA, 50 bp, synthetic construct
  source 1..50: mol_type = other DNA
acttctttttcatattctttaattttagctaaagaaggaagaatgaaagt

SEQ ID NO: 66100 - DNA, 50 bp, synthetic construct
  source 1..50: mol_type = other DNA
gataatgaggtcagcatttctggcgttcgattccggctctgggcattttc

SEQ ID NO: 66101 - DNA, 50 bp, synthetic construct
  source 1..50: mol_type = other DNA
tattgatttggaaatttcccaggtcaccctagaaggaggctctattttta

SEQ ID NO: 66102 - DNA, 50 bp, synthetic construct
  source 1..50: mol_type = other DNA
tccagtgtggacttgagctaacgcgatctgctgctccaggccgggctgcg

SEQ ID NO: 66103 - DNA, 50 bp, synthetic construct
  source 1..50: mol_type = other DNA
gggcagctggactcgaaccaacgcatgcttttcccctggcaagtgccgcc

SEQ ID NO: 66104 - DNA, 50 bp, synthetic construct
  source 1..50: mol_type = other DNA
ttgggttcactcccgggcagtttcatgatagggaagcaaagcaataccaa

SEQ ID NO: 66105 - DNA, 50 bp, synthetic construct
  source 1..50: mol_type = other DNA
gctgaacaaataagggcaacctacagtaatgttggaaatattggtgaggc

SEQ ID NO: 66106 - DNA, 50 bp, synthetic construct
  source 1..50: mol_type = other DNA
aaaagataattgaataggaactattaattgatactagataaaaccatttc

SEQ ID NO: 66107 - DNA, 50 bp, synthetic construct
  source 1..50: mol_type = other DNA
ggaagtatttttgtttcaagcgtggatacataggaaacaaaaagaaaaga

SEQ ID NO: 66108 - DNA, 50 bp, synthetic construct
  source 1..50: mol_type = other DNA
ggttcataaactccgcgtacctcagaaaaagtgttctgttcttttgaaca

SEQ ID NO: 66109 - DNA, 50 bp, synthetic construct
  source 1..50: mol_type = other DNA
gagaaggtcttgcccatgttttccatgcgctatctgtcccagcgctactc

SEQ ID NO: 66110 - DNA, 50 bp, synthetic construct
  source 1..50: mol_type = other DNA
tcaggcagcgggggccttcccaaactattgggatggcccgtttatccaac

SEQ ID NO: 66111 - DNA, 50 bp, synthetic construct
  source 1..50: mol_type = other DNA
ttcctctttttctcttcaaccaatttcagggatgaagccaacaagaagcc

SEQ ID NO: 66112 - DNA, 50 bp, synthetic construct
  source 1..50: mol_type = other DNA
taattacctgcacatcactcataaaacattgagtaacataacgataatcc

SEQ ID NO: 66113 - DNA, 50 bp, synthetic construct
  source 1..50: mol_type = other DNA
tattgattgataagtgtcaagccgcaagctttgctactgatgtagcactt

SEQ ID NO: 66114 - DNA, 50 bp, synthetic construct
  source 1..50: mol_type = other DNA
gggaattgcagtgtaaagcctatgcccaggcgggaagttatgaattgcaa

SEQ ID NO: 66115 - DNA, 50 bp, synthetic construct
  source 1..50: mol_type = other DNA
ccaatttaccgagaatacgagcaaatgtgtacgatttctcttgccattct

SEQ ID NO: 66116 - DNA, 50 bp, synthetic construct
  source 1..50: mol_type = other DNA
atcattatcaaaaaatgttgtattttgtaacacgattttttattgttagg

SEQ ID NO: 66117 - DNA, 50 bp, synthetic construct
  source 1..50: mol_type = other DNA
tctatcagaaaaaactactggacggcctgcctgttcttttttctgtcttg

SEQ ID NO: 66118 - DNA, 50 bp, synthetic construct
  source 1..50: mol_type = other DNA
agaaacgccgtgtcgctggttacgcccgtattcagcgacgagggcgttat

SEQ ID NO: 66119 - DNA, 50 bp, synthetic construct
  source 1..50: mol_type = other DNA
acgtctacgctacctgaaggaacaccggcgccatcggcaccgagaaattc

SEQ ID NO: 66120 - DNA, 50 bp, synthetic construct
  source 1..50: mol_type = other DNA
cgcgctcctgcagaagtgctttactgatattgcttgacttttcgggcatt

SEQ ID NO: 66121 - DNA, 50 bp, synthetic construct
  source 1..50: mol_type = other DNA
caatgttgcagcccgtcaaaaacggcatcccacgacgggcggagcgattg

SEQ ID NO: 66122 - DNA, 50 bp, synthetic construct
  source 1..50: mol_type = other DNA
aaattctgccactcctttctctttggaaaatgaacagcgtgtagccgtat

SEQ ID NO: 66123 - DNA, 50 bp, synthetic construct
  source 1..50: mol_type = other DNA
ggtactttcatagcataagccataattatgactgcaaacataaatgtatc

SEQ ID NO: 66124 - DNA, 50 bp, synthetic construct
  source 1..50: mol_type = other DNA
cggtgtgcgaaatgtacactggggattttgggtttagtgtttgcacagtt

SEQ ID NO: 66125 - DNA, 50 bp, synthetic construct
  source 1..50: mol_type = other DNA
attcgggcaattctgctttaactgtatatcaaaatgaaaggtgcagtcat

SEQ ID NO: 66126 - DNA, 50 bp, synthetic construct
  source 1..50: mol_type = other DNA
aaaagttgtattaggttatttagattcgggaataacctcgtaaaaattcg

SEQ ID NO: 66127 - DNA, 50 bp, synthetic construct
  source 1..50: mol_type = other DNA
gctgttttcatattgttttctttctcaacaaaaaacggactgatttcagt

SEQ ID NO: 66128 - DNA, 50 bp, synthetic construct
  source 1..50: mol_type = other DNA
ttttctttttttctccccactcatatgaaagtggggtttccgggtgatct

SEQ ID NO: 66129 - DNA, 50 bp, synthetic construct
  source 1..50: mol_type = other DNA
tgtcgtactaactatgcaccgcctgtcggtactgctttgttagtacaatc

SEQ ID NO: 66130 - DNA, 50 bp, synthetic construct
  source 1..50: mol_type = other DNA
acgaatatcaataaaattcatttcaagaaaggaagatttacgatgaatgt

SEQ ID NO: 66131 - DNA, 50 bp, synthetic construct
  source 1..50: mol_type = other DNA
tggaaaacaaactgaaaaaactgaatactcttttttacatacattttcac

SEQ ID NO: 66132 - DNA, 50 bp, synthetic construct
  source 1..50: mol_type = other DNA
tggaggctttatgatataatatatacatatgagattttccagagcatcct

SEQ ID NO: 66133 - DNA, 50 bp, synthetic construct
  source 1..50: mol_type = other DNA
ctcaggaaagagtggattgaacagattctttcaacccctactatcctgat

SEQ ID NO: 66134 - DNA, 50 bp, synthetic construct
  source 1..50: mol_type = other DNA
ctcttcgggcaatacggtattgcttgaaaatcgcataattgcagaaagcg

SEQ ID NO: 66135 - DNA, 50 bp, synthetic construct
  source 1..50: mol_type = other DNA
aaatacttattagataatattaaaaggtttttattatgaaatatgtagct

SEQ ID NO: 66136 - DNA, 50 bp, synthetic construct
  source 1..50: mol_type = other DNA
ttttgaaagaccagataaggaaaaactatgtggtagtgtatgttgctgac

SEQ ID NO: 66137 - DNA, 50 bp, synthetic construct
  source 1..50: mol_type = other DNA
tatgcgtattcaattgcttttttaatacaaacgacacccttgccttaaaa

SEQ ID NO: 66138 - DNA, 50 bp, synthetic construct
  source 1..50: mol_type = other DNA
caataactcctgagtacatttcgctttagtaattggattaatcgttgatg

SEQ ID NO: 66139 - DNA, 50 bp, synthetic construct
  source 1..50: mol_type = other DNA
gggctttttcgtttgttatgtacttgacggcataaccgttgacaccatcc

SEQ ID NO: 66140 - DNA, 50 bp, synthetic construct
  source 1..50: mol_type = other DNA
tataatgatgatgcgtttgtgcggaacagcagagcagaatgggtattata

SEQ ID NO: 66141 - DNA, 50 bp, synthetic construct
  source 1..50: mol_type = other DNA
ttgccattatccatcaccacccacatggcagtgtagcccaactggggcag

SEQ ID NO: 66142 - DNA, 50 bp, synthetic construct
  source 1..50: mol_type = other DNA
acggttaccgctcttgccatttctcaagtaatggcagaagtgtcgtttgt

SEQ ID NO: 66143 - DNA, 50 bp, synthetic construct
  source 1..50: mol_type = other DNA
tattacctctaaaagtgctcattatccaatgatacaatataggtgtcatt

SEQ ID NO: 66144 - DNA, 50 bp, synthetic construct
  source 1..50: mol_type = other DNA
gttatgatataattaaaaatgcgatatcgtgtttttagaggtaatatgtc

SEQ ID NO: 66145 - DNA, 50 bp, synthetic construct
  source 1..50: mol_type = other DNA
ggtttattttttgcttttgcgcatttacaggcaaggaggaaaaaggaatg

SEQ ID NO: 66146 - DNA, 50 bp, synthetic construct
  source 1..50: mol_type = other DNA
ttgaagcagcttttattgttccaatgaggtaacaataagagatctcttaa

SEQ ID NO: 66147 - DNA, 50 bp, synthetic construct
  source 1..50: mol_type = other DNA
ttcttgccattcttatcatcctttctctggcatgtccttaatataatccg

SEQ ID NO: 66148 - DNA, 50 bp, synthetic construct
  source 1..50: mol_type = other DNA
cgaactcatccttggcatttgctctggagctggtcttcctggtctgttga

SEQ ID NO: 66149 - DNA, 50 bp, synthetic construct
  source 1..50: mol_type = other DNA
tctctaatttgtatattgaaaacagaccacttcaacgcatttatttcacc

SEQ ID NO: 66150 - DNA, 50 bp, synthetic construct
  source 1..50: mol_type = other DNA
tgttttcttggataccctttcacctttctgaaaaatcatccagagaaaca

SEQ ID NO: 66151 - DNA, 50 bp, synthetic construct
  source 1..50: mol_type = other DNA
gggtcatagaatacctttgtttgtcgacaaaggaagtgattttacggata

SEQ ID NO: 66152 - DNA, 50 bp, synthetic construct
  source 1..50: mol_type = other DNA
ataaaaaatgtactcaaatcctcaatggaatatgtgctgccatttacatc

SEQ ID NO: 66153 - DNA, 50 bp, synthetic construct
  source 1..50: mol_type = other DNA
ttatttttgattcaaaggaaaaactagcttggaattacgattaaaaataa

SEQ ID NO: 66154 - DNA, 50 bp, synthetic construct
  source 1..50: mol_type = other DNA
aaaacgtgatacgcttttggtcacgattgtacttgctattattggctttc

SEQ ID NO: 66155 - DNA, 50 bp, synthetic construct
  source 1..50: mol_type = other DNA
gtcttatgacaaagactgcatcgaaggcgggatagagcttgtcatgagga

SEQ ID NO: 66156 - DNA, 50 bp, synthetic construct
  source 1..50: mol_type = other DNA
tgatcaattaagccagaaaatcctcgaagatgatccagcatccagccaat

SEQ ID NO: 66157 - DNA, 50 bp, synthetic construct
  source 1..50: mol_type = other DNA
acttgaatttccataagctgctcctttcccgattcgccagaaatattatg

SEQ ID NO: 66158 - DNA, 50 bp, synthetic construct
  source 1..50: mol_type = other DNA
ccgttcagcaccgccgaaaaggagcttctcttttggggccatgtgagcca

SEQ ID NO: 66159 - DNA, 50 bp, synthetic construct
  source 1..50: mol_type = other DNA
ccccattcaagcgcgctaccaaaactctttggtgaaagaattgttctccc

SEQ ID NO: 66160 - DNA, 50 bp, synthetic construct
  source 1..50: mol_type = other DNA
aatatacgtaaaaatgagtataaaaattttttcacattttattttaaatt

SEQ ID NO: 66161 - DNA, 50 bp, synthetic construct
  source 1..50: mol_type = other DNA
aactcacggcctcttgaaccccattcttttatttcaagagaaatcacttg

SEQ ID NO: 66162 - DNA, 50 bp, synthetic construct
  source 1..50: mol_type = other DNA
gaatcatgggcaaaggtaatgtttctaatttttatgcgcctttccttttg

SEQ ID NO: 66163 - DNA, 50 bp, synthetic construct
  source 1..50: mol_type = other DNA
aaaaatcgccgaaaatgggatgaaattacaaattgtttccgcaagttcac

SEQ ID NO: 66164 - DNA, 50 bp, synthetic construct
  source 1..50: mol_type = other DNA
tccggcgtccagctttcgcgccgggacaggcggctgggctgcacttcccc

SEQ ID NO: 66165 - DNA, 50 bp, synthetic construct
  source 1..50: mol_type = other DNA
gcaaggcaggcaggactatcccgtcgaatctaccgtcgctgtcggattgc

SEQ ID NO: 66166 - DNA, 50 bp, synthetic construct
  source 1..50: mol_type = other DNA
ggggttccggtctcatacgaagagccgtccgcgtctttgatctgattaat

SEQ ID NO: 66167 - DNA, 50 bp, synthetic construct
  source 1..50: mol_type = other DNA
taatttcataatatcctacctttccaaaaagaaaggtattattgaaatta

SEQ ID NO: 66168 - DNA, 50 bp, synthetic construct
  source 1..50: mol_type = other DNA
ggatgcgggtttgatgagcggcaaaaaagcgggccagcaccccctgcttt

SEQ ID NO: 66169 - DNA, 50 bp, synthetic construct
  source 1..50: mol_type = other DNA
ttttcatttttttatcactccttgactatttcatgatatcaaaaaataaa

SEQ ID NO: 66170 - DNA, 50 bp, synthetic construct
  source 1..50: mol_type = other DNA
cgttcactgccatgctcgtggcgatgtttatacgaggcgggaacgacccg

SEQ ID NO: 66171 - DNA, 50 bp, synthetic construct
  source 1..50: mol_type = other DNA
cggaccaggaagaccagctccacagcttaaggactggctgaatgaaaaag

SEQ ID NO: 66172 - DNA, 50 bp, synthetic construct
  source 1..50: mol_type = other DNA
gctgctttcaccgtccgcatccccagtgggagctgttcaagacatactgc

SEQ ID NO: 66173 - DNA, 50 bp, synthetic construct
  source 1..50: mol_type = other DNA
tgcatattttaaataatataataaatttattaaataattttatccattta

SEQ ID NO: 66174 - DNA, 50 bp, synthetic construct
  source 1..50: mol_type = other DNA
acaaatcctcccgccgtaatattattttttattgttccaacctgatttgt

SEQ ID NO: 66175 - DNA, 50 bp, synthetic construct
  source 1..50: mol_type = other DNA
cagtataactacgttgtttctgaatagagagaaatcccgcaaaccattgt

SEQ ID NO: 66176 - DNA, 50 bp, synthetic construct
  source 1..50: mol_type = other DNA
attttgcacaatgagcgattctgtcagccctattgctcattgtgcaaatc

SEQ ID NO: 66177 - DNA, 50 bp, synthetic construct
  source 1..50: mol_type = other DNA
ctttgttttccgttgtgtttttgtcccgtcaaacactaatgtgttcaaac

SEQ ID NO: 66178 - DNA, 50 bp, synthetic construct
  source 1..50: mol_type = other DNA
ctctgcgtgtggcggcatattgccgcgggcgtatgctgcgaccttccgtt

SEQ ID NO: 66179 - DNA, 50 bp, synthetic construct
  source 1..50: mol_type = other DNA
atcactctgaaagccaatcatagcaatctatgaatcagacgcagatatct

SEQ ID NO: 66180 - DNA, 50 bp, synthetic construct
  source 1..50: mol_type = other DNA
ttttacaatggtgtcaacagcatatataaatcagaataaccaccaataaa

SEQ ID NO: 66181 - DNA, 50 bp, synthetic construct
  source 1..50: mol_type = other DNA
gattaacaagaaaggttgattttacataaaatttactcttaattcttgat

SEQ ID NO: 66182 - DNA, 50 bp, synthetic construct
  source 1..50: mol_type = other DNA
gctgtgcctcccgcgtattcactgactttcagattctgatcagcaccatc

SEQ ID NO: 66183 - DNA, 50 bp, synthetic construct
  source 1..50: mol_type = other DNA
tgaatgtttccaaattgtatgtatgcatacagtttgattgagagtgaggt

SEQ ID NO: 66184 - DNA, 50 bp, synthetic construct
  source 1..50: mol_type = other DNA
gtaattatatgtaaaaaggtataaaattcccatttcggccatataagtac

SEQ ID NO: 66185 - DNA, 50 bp, synthetic construct
  source 1..50: mol_type = other DNA
ctgtgaacagcaatacgcttcgccatagtgaagtgtgctgctgatcaaag

SEQ ID NO: 66186 - DNA, 50 bp, synthetic construct
  source 1..50: mol_type = other DNA
ttaaatctgattatgggcaattcatgcccgctgcgttgcatccgaatccc

SEQ ID NO: 66187 - DNA, 50 bp, synthetic construct
  source 1..50: mol_type = other DNA
gatacttccttacaaaatcgtctggtaatttcattttgcagggcagcata

SEQ ID NO: 66188 - DNA, 50 bp, synthetic construct
  source 1..50: mol_type = other DNA
gacatcttacctttatttagtatgattaaactggataagaatagaacaac

SEQ ID NO: 66189 - DNA, 50 bp, synthetic construct
  source 1..50: mol_type = other DNA
ctaaaaaaaggttactgttcacacgccagtgaaaagcaaccagtgatcaa

SEQ ID NO: 66190 - DNA, 50 bp, synthetic construct
  source 1..50: mol_type = other DNA
aaaaataacacctattgccaggtgtcagacttgcgataaatgattttctt

SEQ ID NO: 66191 - DNA, 50 bp, synthetic construct
  source 1..50: mol_type = other DNA
gctatcttcaaaaaatgactttacaaggaggcgatttctttgaagaaagt

SEQ ID NO: 66192 - DNA, 50 bp, synthetic construct
  source 1..50: mol_type = other DNA
ttttccttagagtcaaacacttttaagaaagtattggagggaacggaatg

SEQ ID NO: 66193 - DNA, 50 bp, synthetic construct
  source 1..50: mol_type = other DNA
taggttacgcaaccttatcttcaaatttgatgtcgaacttgataaacctc

SEQ ID NO: 66194 - DNA, 50 bp, synthetic construct
  source 1..50: mol_type = other DNA
cattcgaagggctgaccggatcagatcgtttccgtcaacccctgaaacca

SEQ ID NO: 66195 - DNA, 50 bp, synthetic construct
  source 1..50: mol_type = other DNA
ctctcgctcattgtctccctgcgctccttgctatagacggtgatgtagtc

SEQ ID NO: 66196 - DNA, 50 bp, synthetic construct
  source 1..50: mol_type = other DNA
agagatcagccgtcctttcgcagggcttgcccagcccccggcgaatcact

SEQ ID NO: 66197 - DNA, 50 bp, synthetic construct
  source 1..50: mol_type = other DNA
tgaggccgtccatgagccgggccacgtagcggggatcatgcgcaccctcg

SEQ ID NO: 66198 - DNA, 50 bp, synthetic construct
  source 1..50: mol_type = other DNA
cgattgccccggtgacgctggcggatcgtccagcacgtccacggtctcac

SEQ ID NO: 66199 - DNA, 50 bp, synthetic construct
  source 1..50: mol_type = other DNA
accttgcatacgtctcaaccaaaagcaattatgagcgacgtgtggggtgt

SEQ ID NO: 66200 - DNA, 50 bp, synthetic construct
  source 1..50: mol_type = other DNA
ttaaaaatcaatattgggaatatatttacatgatatgtacggcgcattta

SEQ ID NO: 66201 - DNA, 50 bp, synthetic construct
  source 1..50: mol_type = other DNA
aataaaggatctgacagtctgctgcgtcacagactgtcaacccctttctt

SEQ ID NO: 66202 - DNA, 50 bp, synthetic construct
  source 1..50: mol_type = other DNA
ttcaaggacgaaaacgaggtagcacgggcgacttgttctgtttccatgag

SEQ ID NO: 66203 - DNA, 50 bp, synthetic construct
  source 1..50: mol_type = other DNA
ttcatagcataagccataacatacacgaatgtttttgaggattgtggaag

SEQ ID NO: 66204 - DNA, 50 bp, synthetic construct
  source 1..50: mol_type = other DNA
catatccaacatctatgtactgatgaattagcgcatagatgttggaaatg

SEQ ID NO: 66205 - DNA, 50 bp, synthetic construct
  source 1..50: mol_type = other DNA
atcctgcggagggtgtcagcgcgagggcaacaaaaacagaccgtcaaaaa

SEQ ID NO: 66206 - DNA, 50 bp, synthetic construct
  source 1..50: mol_type = other DNA
ttttctttcctctcaatgatttgtatacaaatttatggcggcttggaagt

SEQ ID NO: 66207 - DNA, 50 bp, synthetic construct
  source 1..50: mol_type = other DNA
gatttcggagaataatgtgccgaaaagaaataattctatacaaatttatg

SEQ ID NO: 66208 - DNA, 50 bp, synthetic construct
  source 1..50: mol_type = other DNA
gaaaactgcgcagtcagtgtgcgacaaagcacaggcagttggcatggaac

SEQ ID NO: 66209 - DNA, 50 bp, synthetic construct
  source 1..50: mol_type = other DNA
acagttccaaaacacgctaaaataattccttgggaaccttttgcccgcag

SEQ ID NO: 66210 - DNA, 50 bp, synthetic construct
  source 1..50: mol_type = other DNA
aaggtacatagggactacccccactagccagggagatgtgaatgtcccct

SEQ ID NO: 66211 - DNA, 50 bp, synthetic construct
  source 1..50: mol_type = other DNA
tcaataatccggggcttgcagcagaacaaaaataagccccggaaccagta

SEQ ID NO: 66212 - DNA, 50 bp, synthetic construct
  source 1..50: mol_type = other DNA
atatatcaagcggtttccgcgaaaatttattgtggaaccgccagatctat

SEQ ID NO: 66213 - DNA, 50 bp, synthetic construct
  source 1..50: mol_type = other DNA
gtctgatattgggaacttcaggagttgacctgttcggatttcaggatgat

SEQ ID NO: 66214 - DNA, 50 bp, synthetic construct
  source 1..50: mol_type = other DNA
ttttttcgttgattaagacagaagaaaatggatataagacaacgaaagaa

SEQ ID NO: 66215 - DNA, 50 bp, synthetic construct
  source 1..50: mol_type = other DNA
tatgaaccaattaagtcaagtaaattattacggtacttaataggtgtagg

SEQ ID NO: 66216 - DNA, 50 bp, synthetic construct
  source 1..50: mol_type = other DNA
cttaattcaccgccccattctcccagcaaaatccccgattgtacgcgaat

SEQ ID NO: 66217 - DNA, 50 bp, synthetic construct
  source 1..50: mol_type = other DNA
aggagcgcaaggaactgagaaaagaagttttggtcgatctatgctatatt

SEQ ID NO: 66218 - DNA, 50 bp, synthetic construct
  source 1..50: mol_type = other DNA
tatgatatgatggttctatcggtaaacctttttagaaaaagcatcggcat

SEQ ID NO: 66219 - DNA, 50 bp, synthetic construct
  source 1..50: mol_type = other DNA
gacgcgcttttgatgaatatcggcttgcttgttttgtctaaaattgcata

SEQ ID NO: 66220 - DNA, 50 bp, synthetic construct
  source 1..50: mol_type = other DNA
ggaactgaaagaaatttagaaaagaatgttgcagtatgtttttgagtttt

SEQ ID NO: 66221 - DNA, 50 bp, synthetic construct
  source 1..50: mol_type = other DNA
aacatgaatcgcccgtttacgggctgagcgtcctcgtctgaggtttcttt

SEQ ID NO: 66222 - DNA, 50 bp, synthetic construct
  source 1..50: mol_type = other DNA
tgggatattaagttatgtgtataatatttgcagatatatctagtataact

SEQ ID NO: 66223 - DNA, 50 bp, synthetic construct
  source 1..50: mol_type = other DNA
atttggccatttcttttcgctccttaaagtatgaaaccaatattagctat

SEQ ID NO: 66224 - DNA, 50 bp, synthetic construct
  source 1..50: mol_type = other DNA
tcaagcgttttcggataataatgtaccaatgattatgttaaaaagaagcg

SEQ ID NO: 66225 - DNA, 50 bp, synthetic construct
  source 1..50: mol_type = other DNA
attttcttttttcgattacttcatacaaagattaacagaaaaagcgcctc

SEQ ID NO: 66226 - DNA, 50 bp, synthetic construct
  source 1..50: mol_type = other DNA
atgtacccaataatggcctgtatttttgtttcggattttgatggtattat

SEQ ID NO: 66227 - DNA, 50 bp, synthetic construct
  source 1..50: mol_type = other DNA
gctgctcaatattggaaaagctcgatttggcttgggtgatgatgaggagg

SEQ ID NO: 66228 - DNA, 50 bp, synthetic construct
  source 1..50: mol_type = other DNA
gatctgaatttccacaagccatacctgaaccttttgtaaaaattcattac

SEQ ID NO: 66229 - DNA, 50 bp, synthetic construct
  source 1..50: mol_type = other DNA
gtcttgctttgcggctcttgccatttgaagcaaagatcgcaaagcaggag

SEQ ID NO: 66230 - DNA, 50 bp, synthetic construct
  source 1..50: mol_type = other DNA
caacgaaaaaagccctaccgctcacgtagttggtgtggtttgtttcattg

SEQ ID NO: 66231 - DNA, 50 bp, synthetic construct
  source 1..50: mol_type = other DNA
cgtgcggacaattcccgcatcatttaagagactttcagataatcccgtat

SEQ ID NO: 66232 - DNA, 50 bp, synthetic construct
  source 1..50: mol_type = other DNA
aaaccttgcggtcggcgatttttcttcaaaaatcgccgcgttcaacgcct

SEQ ID NO: 66233 - DNA, 50 bp, synthetic construct
  source 1..50: mol_type = other DNA
tgcctaagaaaggcagttaattttatattatacctcttcagttttcactg

SEQ ID NO: 66234 - DNA, 50 bp, synthetic construct
  source 1..50: mol_type = other DNA
agatacctccgggacaacagccagatacaatgtttggctatatggtaagc

SEQ ID NO: 66235 - DNA, 50 bp, synthetic construct
  source 1..50: mol_type = other DNA
ccttgtaattatttctatctctgctttgtgttataggtataattaccttg

SEQ ID NO: 66236 - DNA, 50 bp, synthetic construct
  source 1..50: mol_type = other DNA
tatcatcctttctctgaatataaatatatttgatcatggctgtgatgaag

SEQ ID NO: 66237 - DNA, 50 bp, synthetic construct
  source 1..50: mol_type = other DNA
atgtgcagtgtttcactcttcatgtcctggcctgttgacacacggcagta

SEQ ID NO: 66238 - DNA, 50 bp, synthetic construct
  source 1..50: mol_type = other DNA
gctttgaagcacaggtcgagtattatagaactggaacagcagacagaagc

SEQ ID NO: 66239 - DNA, 50 bp, synthetic construct
  source 1..50: mol_type = other DNA
gtgtgcatcgggcggtttctgaaaatgcacccagctcgccatctgcaccc

SEQ ID NO: 66240 - DNA, 50 bp, synthetic construct
  source 1..50: mol_type = other DNA
attttatgaccactcgtcaattcgtacgttatccttatccgtcataatat

SEQ ID NO: 66241 - DNA, 50 bp, synthetic construct
  source 1..50: mol_type = other DNA
catataggtgagttcttcgggcagagctgccttgcgctctcttctatatt

SEQ ID NO: 66242 - DNA, 50 bp, synthetic construct
  source 1..50: mol_type = other DNA
ccattacgatgggctttggctgtaattacattgaaagccctcacaagtga

SEQ ID NO: 66243 - DNA, 50 bp, synthetic construct
  source 1..50: mol_type = other DNA
ctttgcagagagttaatctttgcaaagaaaaaatagagatctacgcaaaa

SEQ ID NO: 66244 - DNA, 50 bp, synthetic construct
  source 1..50: mol_type = other DNA
agcgtcgagcgaggagaaagagtcctttctcccctttctcgccttttgcg

SEQ ID NO: 66245 - DNA, 50 bp, synthetic construct
  source 1..50: mol_type = other DNA
taaactgttgaagtgacaactcttataagttaggacatctcaataattat

SEQ ID NO: 66246 - DNA, 50 bp, synthetic construct
  source 1..50: mol_type = other DNA
ctattctcattatgaattgcatcgaaaaacttagcttataattcgaaacc

SEQ ID NO: 66247 - DNA, 50 bp, synthetic construct
  source 1..50: mol_type = other DNA
accaaataggagtccacgccccacgcgaacgagctggaggatgtgctgga

SEQ ID NO: 66248 - DNA, 50 bp, synthetic construct
  source 1..50: mol_type = other DNA
gtcaggcttcagcccggcatacgcccgcgtcgggcggcggttcgttagac

SEQ ID NO: 66249 - DNA, 50 bp, synthetic construct
  source 1..50: mol_type = other DNA
cacgaattcatcctccaaatctgaaatcaagccaggatccgcagtgatgc

SEQ ID NO: 66250 - DNA, 50 bp, synthetic construct
  source 1..50: mol_type = other DNA
acagcagcacggtcggtcacagtcattcccgaagtcgagggtgttgctcc

SEQ ID NO: 66251 - DNA, 50 bp, synthetic construct
  source 1..50: mol_type = other DNA
attctgtttatctcccataaactaaaggaggaaaaaggaatgaacagaac

SEQ ID NO: 66252 - DNA, 50 bp, synthetic construct
  source 1..50: mol_type = other DNA
tagttacggatttggccatttcttttcggggatcagtaaagccgcgctgt

SEQ ID NO: 66253 - DNA, 50 bp, synthetic construct
  source 1..50: mol_type = other DNA
cggtagtgtctatatatcactctaaataatatgatatactattactaatt

SEQ ID NO: 66254 - DNA, 50 bp, synthetic construct
  source 1..50: mol_type = other DNA
tctggtattcgatgaaggtcttcgccggaagtccgttttcgaaaacggat

SEQ ID NO: 66255 - DNA, 50 bp, synthetic construct
  source 1..50: mol_type = other DNA
caacgctgctgctgattgaccgggaagggcgattttgaggcgcagcttga

SEQ ID NO: 66256 - DNA, 50 bp, synthetic construct
  source 1..50: mol_type = other DNA
attcgcaggcaggacttaatcaggtccgtgccgctgttctccctgcttcc

SEQ ID NO: 66257 - DNA, 50 bp, synthetic construct
  source 1..50: mol_type = other DNA
gcgcaagatcgtcaatgcgttctgtaccgaaaatcggaaaaatattgcga

SEQ ID NO: 66258 - DNA, 50 bp, synthetic construct
  source 1..50: mol_type = other DNA
tacacaactatggaaaaatttggtatacaaaactttttcttttttggagc

SEQ ID NO: 66259 - DNA, 50 bp, synthetic construct
  source 1..50: mol_type = other DNA
gttaaagaaattttagcacaaactatatcggcgacggcaatttcttcaac

SEQ ID NO: 66260 - DNA, 50 bp, synthetic construct
  source 1..50: mol_type = other DNA
gaatgagaaaagttatggcgcaggcagatgcgtcaaggtatttacagtcg

SEQ ID NO: 66261 - DNA, 50 bp, synthetic construct
  source 1..50: mol_type = other DNA
atctgcctcctacaagagtgggttatactggatttcgatatagtccttat

SEQ ID NO: 66262 - DNA, 50 bp, synthetic construct
  source 1..50: mol_type = other DNA
gaatcacatcgcttgatgatctcaagggattcagagctaatatgtgacac

SEQ ID NO: 66263 - DNA, 50 bp, synthetic construct
  source 1..50: mol_type = other DNA
cctgaaacgcaagagggagaagaagttttttctcccttagtgtagtcgca

SEQ ID NO: 66264 - DNA, 50 bp, synthetic construct
  source 1..50: mol_type = other DNA
atggtaatccgagattagttacatttgttaatctaatcttactcatacat

SEQ ID NO: 66265 - DNA, 50 bp, synthetic construct
  source 1..50: mol_type = other DNA
tatgggttgcacagtacgcgaacaataacgcccgttccgttgcattttta

SEQ ID NO: 66266 - DNA, 50 bp, synthetic construct
  source 1..50: mol_type = other DNA
catcagctgacacaggggctaacgaaaggctctccctttgtggcggtctc

SEQ ID NO: 66267 - DNA, 50 bp, synthetic construct
  source 1..50: mol_type = other DNA
tttaaaatacttttttattttattttaatcaacgaaaaaatgaccgacca

SEQ ID NO: 66268 - DNA, 50 bp, synthetic construct
  source 1..50: mol_type = other DNA
tattcatttctcacgctcctttctcgcaaaaggagcgtataaaactccga

SEQ ID NO: 66269 - DNA, 50 bp, synthetic construct
  source 1..50: mol_type = other DNA
ggaagatggtaagtggggtgcaaaattcttcgtcgaatgtacaaagcccc

SEQ ID NO: 66270 - DNA, 50 bp, synthetic construct
  source 1..50: mol_type = other DNA
tatccataataaaaaacctccattttctttgataatttttatcaccttta

SEQ ID NO: 66271 - DNA, 50 bp, synthetic construct
  source 1..50: mol_type = other DNA
ttgctgcccagtattcttttcctgacctgggcttcaaaactgtgaagctg

SEQ ID NO: 66272 - DNA, 50 bp, synthetic construct
  source 1..50: mol_type = other DNA
catcacttccttcaaaaaaccttttcctctgtttcccaaatgattgtatt

SEQ ID NO: 66273 - DNA, 50 bp, synthetic construct
  source 1..50: mol_type = other DNA
agagcagctgactcttaatcagcgggcggtccaaaagaggaggtcgctgc

SEQ ID NO: 66274 - DNA, 50 bp, synthetic construct
  source 1..50: mol_type = other DNA
tatgcctttgtaaaaaatagtttcatgaacctatttattgcaaaaagact

SEQ ID NO: 66275 - DNA, 50 bp, synthetic construct
  source 1..50: mol_type = other DNA
atattgactacaagggtttttttatgttggaataacctcagagcctatat

SEQ ID NO: 66276 - DNA, 50 bp, synthetic construct
  source 1..50: mol_type = other DNA
ggctgtggtttgaatgtagttagctgaacgtacgtatcaaagccatccac

SEQ ID NO: 66277 - DNA, 50 bp, synthetic construct
  source 1..50: mol_type = other DNA
aagtgacattaaatgtaactctgaatggggatatacatacgaacaaaatg

SEQ ID NO: 66278 - DNA, 50 bp, synthetic construct
  source 1..50: mol_type = other DNA
gaattcattggaaattctgaggaatgttattatacacaaccattgacaga

SEQ ID NO: 66279 - DNA, 50 bp, synthetic construct
  source 1..50: mol_type = other DNA
gcagctcgtaaaagtgatggtgtgcgcaagctttcagagcaaagagctgc

SEQ ID NO: 66280 - DNA, 50 bp, synthetic construct
  source 1..50: mol_type = other DNA
gccgtcaacagacaattctgcgaaatttatttgaaggctacattcacggt

SEQ ID NO: 66281 - DNA, 50 bp, synthetic construct
  source 1..50: mol_type = other DNA
accgaaaatgcgttgtactaatcatatgattagtacaacacagattaaaa

SEQ ID NO: 66282 - DNA, 50 bp, synthetic construct
  source 1..50: mol_type = other DNA
tgctggggttcttctattttgtactagtacaacactacccaaaaacaaca

SEQ ID NO: 66283 - DNA, 50 bp, synthetic construct
  source 1..50: mol_type = other DNA
aattatacttgctataattgaaataattttaccttgttttcgaggaaaca

SEQ ID NO: 66284 - DNA, 50 bp, synthetic construct
  source 1..50: mol_type = other DNA
atttttcaacgtcctgaattggatttgtgcagatcttattgcaaaaaaaa

SEQ ID NO: 66285 - DNA, 50 bp, synthetic construct
  source 1..50: mol_type = other DNA
tattaagagtaaataagttacaccataaaaatatttaaataagaggagtt

SEQ ID NO: 66286 - DNA, 50 bp, synthetic construct
  source 1..50: mol_type = other DNA
tgaaaatttctttcataatttgcagcatcaaaataactaaatcatataca

SEQ ID NO: 66287 - DNA, 50 bp, synthetic construct
  source 1..50: mol_type = other DNA
ctaaaaatagattttctatctatcgaggattatcgagactctattgacat

SEQ ID NO: 66288 - DNA, 50 bp, synthetic construct
  source 1..50: mol_type = other DNA
taggctactttttttctcataattatcaagatgaaaaaaattgaaaataa

SEQ ID NO: 66289 - DNA, 50 bp, synthetic construct
  source 1..50: mol_type = other DNA
cgaattcgcccatttggagatgatggaacttctccatcttcagaacttcc

SEQ ID NO: 66290 - DNA, 50 bp, synthetic construct
  source 1..50: mol_type = other DNA
tttagcactacaataatgctattctacaacatcattaagccagtggtcga

SEQ ID NO: 66291 - DNA, 50 bp, synthetic construct
  source 1..50: mol_type = other DNA
atgcttgtttgctttacctccaacatgctggaaaatcaggaaaaaaacgg

SEQ ID NO: 66292 - DNA, 50 bp, synthetic construct
  source 1..50: mol_type = other DNA
agatttccatctttctgatatcctgcagctctaaacaaatatgctgctca

SEQ ID NO: 66293 - DNA, 50 bp, synthetic construct
  source 1..50: mol_type = other DNA
catgtgctcggacgactcattggagaacaaaaagttcaagactacacacc

SEQ ID NO: 66294 - DNA, 50 bp, synthetic construct
  source 1..50: mol_type = other DNA
ctcgactgccagcctgaggacctgaccgcgactatacgctagaggtcgag

SEQ ID NO: 66295 - DNA, 50 bp, synthetic construct
  source 1..50: mol_type = other DNA
aatttccttgcttacctttccgagaaggaggtaataagatgaagcaatgt

SEQ ID NO: 66296 - DNA, 50 bp, synthetic construct
  source 1..50: mol_type = other DNA
taattttattttagatttgtctttcgactgtcaaagttattttagatttt

SEQ ID NO: 66297 - DNA, 50 bp, synthetic construct
  source 1..50: mol_type = other DNA
cggaatgcaccgaaagcggaacaggtcttttcatttttcttgggactcac

SEQ ID NO: 66298 - DNA, 50 bp, synthetic construct
  source 1..50: mol_type = other DNA
cgttttgtagaaaaattctaccttaagaggtgttatttttatgaaaaaaa

SEQ ID NO: 66299 - DNA, 50 bp, synthetic construct
  source 1..50: mol_type = other DNA
tcggcaccgggatcctcctgcggtgcggtgtcagtggctcgtgtgctgta

SEQ ID NO: 66300 - DNA, 50 bp, synthetic construct
  source 1..50: mol_type = other DNA
ttgttttgctttatccagatgatgaccatcaatgcgatggcgtataacag

SEQ ID NO: 66301 - DNA, 50 bp, synthetic construct
  source 1..50: mol_type = other DNA
cattcaagcgcgctaccaaaactgcggcgtttttgcgtttcgcggaaatg

SEQ ID NO: 66302 - DNA, 50 bp, synthetic construct
  source 1..50: mol_type = other DNA
atagttctcacataatcgccctgcaaaactacagatcatacttccaatat

SEQ ID NO: 66303 - DNA, 50 bp, synthetic construct
  source 1..50: mol_type = other DNA
cctcgctgtccgtggaaacacgagcatcgaaatagaaacggacagccata

SEQ ID NO: 66304 - DNA, 50 bp, synthetic construct
  source 1..50: mol_type = other DNA
cttcaagcggcgaaactccgtgttgaaacacgagcatatgcggcggtgcg

SEQ ID NO: 66305 - DNA, 50 bp, synthetic construct
  source 1..50: mol_type = other DNA
tttttgatgtgctatgtaaaacaaatgtgttctccatagtgcaaaggata

SEQ ID NO: 66306 - DNA, 50 bp, synthetic construct
  source 1..50: mol_type = other DNA
acctgcggagaaagcatggcaaagatctgagttgcctgttcttcattgac

SEQ ID NO: 66307 - DNA, 50 bp, synthetic construct
  source 1..50: mol_type = other DNA
ttcctggccttctctgctataatataatacttaaaggagtgagccagaat

SEQ ID NO: 66308 - DNA, 50 bp, synthetic construct
  source 1..50: mol_type = other DNA
ctctgaaagccaataatagcaagtgtccttatctttaatctggaagagac

SEQ ID NO: 66309 - DNA, 50 bp, synthetic construct
  source 1..50: mol_type = other DNA
gatataaaagcaggagatttcaaaaagggtaaatgaactcctgaaataag

SEQ ID NO: 66310 - DNA, 50 bp, synthetic construct
  source 1..50: mol_type = other DNA
ccttttttcgggatattccataggaaaacggcgaaaagcccgaaaaataa

SEQ ID NO: 66311 - DNA, 50 bp, synthetic construct
  source 1..50: mol_type = other DNA
cacattccatatattttatctccttaagatgataaatcaagtgatatttt

SEQ ID NO: 66312 - DNA, 50 bp, synthetic construct
  source 1..50: mol_type = other DNA
cattatgctgatacctgtactccattttctatacaaacggcagctcctca

SEQ ID NO: 66313 - DNA, 50 bp, synthetic construct
  source 1..50: mol_type = other DNA
tgtctccacggacagtgaggaacagctccctggggctgtcctctgtcagg

SEQ ID NO: 66314 - DNA, 50 bp, synthetic construct
  source 1..50: mol_type = other DNA
ttgcgcctttgagagcttcattggatcatacgagaaataaggaggaaaaa

SEQ ID NO: 66315 - DNA, 50 bp, synthetic construct
  source 1..50: mol_type = other DNA
aattaaaacaaaacccaaaccacaaagagaacataggtttgaaaggagtt

SEQ ID NO: 66316 - DNA, 50 bp, synthetic construct
  source 1..50: mol_type = other DNA
ggtattcctcgtcagcggggaggacgatgaaatagagaaagagggatgat

SEQ ID NO: 66317 - DNA, 50 bp, synthetic construct
  source 1..50: mol_type = other DNA
tctcgtcccgccaaggttctgacggcatcgtgtacccgtatgggatgtac

SEQ ID NO: 66318 - DNA, 50 bp, synthetic construct
  source 1..50: mol_type = other DNA
ctccttgtttttattatttgcctttgctcgcaataaatgcaccagaactt

SEQ ID NO: 66319 - DNA, 50 bp, synthetic construct
  source 1..50: mol_type = other DNA
ttttttttgtactaatactaatctatagaaaacaaacggtatcggaaaaa

SEQ ID NO: 66320 - DNA, 50 bp, synthetic construct
  source 1..50: mol_type = other DNA
aggttattccaacagagccatattttagtaaatttcaatggccattacca

SEQ ID NO: 66321 - DNA, 50 bp, synthetic construct
  source 1..50: mol_type = other DNA
agatattgttaaacatttgctataaacaattttaaataaaaactatacgt

SEQ ID NO: 66322 - DNA, 50 bp, synthetic construct
  source 1..50: mol_type = other DNA
ggcactggggtaaaatgctggttgccgttccagcgcattacccttctgca

SEQ ID NO: 66323 - DNA, 50 bp, synthetic construct
  source 1..50: mol_type = other DNA
gcactctgcaggtcaaccagcaggtcgctcttggttgggctgggatatga

SEQ ID NO: 66324 - DNA, 50 bp, synthetic construct
  source 1..50: mol_type = other DNA
ctcaggaacaccgtgatcaagaatttattctcattttacttgtttatcgt

SEQ ID NO: 66325 - DNA, 50 bp, synthetic construct
  source 1..50: mol_type = other DNA
aaagaccactggctgtgatacaaaattctgtatccgtatgggatgtggtt

SEQ ID NO: 66326 - DNA, 50 bp, synthetic construct
  source 1..50: mol_type = other DNA
gcctttgattgattcatcaaagcgcctccattgatgattccgcaaaaggt

SEQ ID NO: 66327 - DNA, 50 bp, synthetic construct
  source 1..50: mol_type = other DNA
attactcactctgaatacccgaaaagttccccctcaaattggtgagtgtg

SEQ ID NO: 66328 - DNA, 50 bp, synthetic construct
  source 1..50: mol_type = other DNA
ggatgcggctgagataaagccggaagaacgggcggctctgctgcgcatgc

SEQ ID NO: 66329 - DNA, 50 bp, synthetic construct
  source 1..50: mol_type = other DNA
acaccatacggctacatcatagaaaattctcctatataggcgtgttcatt

SEQ ID NO: 66330 - DNA, 50 bp, synthetic construct
  source 1..50: mol_type = other DNA
atatattatactgataacaccgttacggatactgcagcataataatcaat

SEQ ID NO: 66331 - DNA, 50 bp, synthetic construct
  source 1..50: mol_type = other DNA
tttcgattttagcgtattcccgctcgtcttgcattacgctgttatcgcaa

SEQ ID NO: 66332 - DNA, 50 bp, synthetic construct
  source 1..50: mol_type = other DNA
gcaagcatggcttgaaatccgggccggttattcgggcaagtcaatcttgc

SEQ ID NO: 66333 - DNA, 50 bp, synthetic construct
  source 1..50: mol_type = other DNA
aagaagtctatatgattttttcgtatagaaaaaatctttatctttttctt

SEQ ID NO: 66334 - DNA, 50 bp, synthetic construct
  source 1..50: mol_type = other DNA
ttgaataaagcttttcagtctgcttatctaatacatactgctttatttct

SEQ ID NO: 66335 - DNA, 50 bp, synthetic construct
  source 1..50: mol_type = other DNA
cacataaacataaaaaacaatcaaatttatggatttattcacggtacagg

SEQ ID NO: 66336 - DNA, 50 bp, synthetic construct
  source 1..50: mol_type = other DNA
gatccgtcgttttgccagctgcaagcttcttgctaccactcactcgcatc

SEQ ID NO: 66337 - DNA, 50 bp, synthetic construct
  source 1..50: mol_type = other DNA
tagaatagacatacagggtggcactactctgcctcggttcggttattctc

SEQ ID NO: 66338 - DNA, 50 bp, synthetic construct
  source 1..50: mol_type = other DNA
ccatcggagtcgcattatgtaagtgcacttattgatgatttattggaaat

SEQ ID NO: 66339 - DNA, 50 bp, synthetic construct
  source 1..50: mol_type = other DNA
gcgatagctgaccgaagatgatacaacgatcctgaccttttttgtttcgt

SEQ ID NO: 66340 - DNA, 50 bp, synthetic construct
  source 1..50: mol_type = other DNA
gctggcgctttgatgcagctccatttatacttctgcttcaaagtttcaaa

SEQ ID NO: 66341 - DNA, 50 bp, synthetic construct
  source 1..50: mol_type = other DNA
accatcaatggcaaggtgggtgcgaccgcatggaactcgaagtagatggt

SEQ ID NO: 66342 - DNA, 50 bp, synthetic construct
  source 1..50: mol_type = other DNA
ctatcgacatatctgtttacccgttacgtctcacacagatacatcgggcc

SEQ ID NO: 66343 - DNA, 50 bp, synthetic construct
  source 1..50: mol_type = other DNA
gctgcggcacggcatctgcgttgccagcaacgctcatgcaaggatggcaa

SEQ ID NO: 66344 - DNA, 50 bp, synthetic construct
  source 1..50: mol_type = other DNA
tacaataaaggcagtcggttccatgccgcgcactgactgcgcagttttcc

SEQ ID NO: 66345 - DNA, 50 bp, synthetic construct
  source 1..50: mol_type = other DNA
tgtaatggtgaaatggttaagatatagagctttcgtattttattggcttc

SEQ ID NO: 66346 - DNA, 50 bp, synthetic construct
  source 1..50: mol_type = other DNA
tatgctacttccgggtagcgcatatataccacctactacgcctcaggtga

SEQ ID NO: 66347 - DNA, 50 bp, synthetic construct
  source 1..50: mol_type = other DNA
tatccacaagtccgcgccgcttaccgcaaaaggcaaaaaactttatgata

SEQ ID NO: 66348 - DNA, 50 bp, synthetic construct
  source 1..50: mol_type = other DNA
caggaaaggaaatatttttatgattaaacatgtaaaattctcctttctac

SEQ ID NO: 66349 - DNA, 50 bp, synthetic construct
  source 1..50: mol_type = other DNA
atttgcgcactccttgcgcacgcagatgtctgcgcaggctgtgggcgggg

SEQ ID NO: 66350 - DNA, 50 bp, synthetic construct
  source 1..50: mol_type = other DNA
acagtgcgaaggatgacatgaagcgccctccatgatacacgccgtggcca

SEQ ID NO: 66351 - DNA, 50 bp, synthetic construct
  source 1..50: mol_type = other DNA
catactttgcggatgcagtggagcttgctgcatatcaggcggccagcgta

SEQ ID NO: 66352 - DNA, 50 bp, synthetic construct
  source 1..50: mol_type = other DNA
cccgcagattagacgaaagcgcaacgccgcgataggcttcgttctggatg

SEQ ID NO: 66353 - DNA, 50 bp, synthetic construct
  source 1..50: mol_type = other DNA
ttctgccttactcggttataatcaagcgatttcacacaccgcaggcgtat

SEQ ID NO: 66354 - DNA, 50 bp, synthetic construct
  source 1..50: mol_type = other DNA
cggttgccttctccttgacgccttcctctgcttcctgctcaatcatatcg

SEQ ID NO: 66355 - DNA, 50 bp, synthetic construct
  source 1..50: mol_type = other DNA
tggaaaatctgacgggttaatccccattgaaagccagattgaattttgca

SEQ ID NO: 66356 - DNA, 50 bp, synthetic construct
  source 1..50: mol_type = other DNA
aacggatcaggaagaccagctccacagccactaggatgtgctgatattac

SEQ ID NO: 66357 - DNA, 50 bp, synthetic construct
  source 1..50: mol_type = other DNA
tattgatttttagtgataagtacgatatcaataagctataaaaatcaata

SEQ ID NO: 66358 - DNA, 50 bp, synthetic construct
  source 1..50: mol_type = other DNA
agtgccaaaaggatacgcctgttctgccataggcggctcctttctttggg

SEQ ID NO: 66359 - DNA, 50 bp, synthetic construct
  source 1..50: mol_type = other DNA
gatatcctggaagatgcaggtgaacttacacctgcaaaggtgtatttttt

SEQ ID NO: 66360 - DNA, 50 bp, synthetic construct
  source 1..50: mol_type = other DNA
acgattttccataagcgtcttactcatcgaagaggcttccatgaaggtca

SEQ ID NO: 66361 - DNA, 50 bp, synthetic construct
  source 1..50: mol_type = other DNA
tatttggttgcttctttttcatggtattatgaaagcgaagcaccgggaaa

SEQ ID NO: 66362 - DNA, 50 bp, synthetic construct
  source 1..50: mol_type = other DNA
aaactgctgtttccataaaatcttaggccaggaaatgcaatcggctttct

SEQ ID NO: 66363 - DNA, 50 bp, synthetic construct
  source 1..50: mol_type = other DNA
ataccacctttcaagcggtaaaaactttggctcagattccagcgacgaca

SEQ ID NO: 66364 - DNA, 50 bp, synthetic construct
  source 1..50: mol_type = other DNA
tcctaaaaaaccgcctgatttctcagttcaaaaattctggtgcttttatt

SEQ ID NO: 66365 - DNA, 50 bp, synthetic construct
  source 1..50: mol_type = other DNA
agctttgcctgctgcgaccatactcatttatagtcgccgtcattaaagga

SEQ ID NO: 66366 - DNA, 50 bp, synthetic construct
  source 1..50: mol_type = other DNA
tccaacgaacggtatcgcggcatctatcgttagaagggggtggcgctgtt

SEQ ID NO: 66367 - DNA, 50 bp, synthetic construct
  source 1..50: mol_type = other DNA
cttaataaacataatcacagccctcctcatcctcaaataatgcctctatc

SEQ ID NO: 66368 - DNA, 50 bp, synthetic construct
  source 1..50: mol_type = other DNA
ttgttgctatcctttaaggccgcaacgcaggccctagaggatgcggtgaa

SEQ ID NO: 66369 - DNA, 50 bp, synthetic construct
  source 1..50: mol_type = other DNA
catttctgccccgaaaatgtctttttggaggtcatcatggagcagtatct

SEQ ID NO: 66370 - DNA, 50 bp, synthetic construct
  source 1..50: mol_type = other DNA
tacgctggccgcctgatatgcagcaagctccactgcatccgcaaagtatg

SEQ ID NO: 66371 - DNA, 50 bp, synthetic construct
  source 1..50: mol_type = other DNA
cgattttcgtaacttttttcaagggaaaatgatacctataacgcacatac

SEQ ID NO: 66372 - DNA, 50 bp, synthetic construct
  source 1..50: mol_type = other DNA
tccattgttttgcgctcctttccttaaaaaatggactccccatcactgga

SEQ ID NO: 66373 - DNA, 50 bp, synthetic construct
  source 1..50: mol_type = other DNA
ttcttttctctgctcatttttgcttaagcaccctatattatagcaaagaa

SEQ ID NO: 66374 - DNA, 50 bp, synthetic construct
  source 1..50: mol_type = other DNA
aaaaatgacagataaaaagagatcatattgactttatcatttcgattaga

SEQ ID NO: 66375 - DNA, 50 bp, synthetic construct
  source 1..50: mol_type = other DNA
gcaaagaacaggctaaaagtacaatgttgtacaatgtttgcgatgagtgg

SEQ ID NO: 66376 - DNA, 50 bp, synthetic construct
  source 1..50: mol_type = other DNA
ggcaaatgggaaagaataaaattttaaaattcagaattttttcatttacc

SEQ ID NO: 66377 - DNA, 50 bp, synthetic construct
  source 1..50: mol_type = other DNA
ccacgcattattgatcagcctacctgtttattctgccatattgtacgttt

SEQ ID NO: 66378 - DNA, 50 bp, synthetic construct
  source 1..50: mol_type = other DNA
tgttacctatacaaagtgatgagtatactcacggacaaatttacacaact

SEQ ID NO: 66379 - DNA, 50 bp, synthetic construct
  source 1..50: mol_type = other DNA
taaagatagacaaataaaagaaccatgggtattgtatcagtcaatttttc

SEQ ID NO: 66380 - DNA, 50 bp, synthetic construct
  source 1..50: mol_type = other DNA
tggattataaccgcaacctggtactggtctccggttgattcggatgccgt

SEQ ID NO: 66381 - DNA, 50 bp, synthetic construct
  source 1..50: mol_type = other DNA
cctttgggcttgccgccgacctctgcagggagatacgcaaaaagttcccg

SEQ ID NO: 66382 - DNA, 50 bp, synthetic construct
  source 1..50: mol_type = other DNA
cccctgcagaatgccactcctttccggaaacctcatcattaatgaagggg

SEQ ID NO: 66383 - DNA, 50 bp, synthetic construct
  source 1..50: mol_type = other DNA
tctcacatccacccaggataaggtcttcctgatccgtggaaacacggcag

SEQ ID NO: 66384 - DNA, 50 bp, synthetic construct
  source 1..50: mol_type = other DNA
caacacccaatcgacgccaagtgcaagcacgtggaggtaattgtttgttt

SEQ ID NO: 66385 - DNA, 50 bp, synthetic construct
  source 1..50: mol_type = other DNA
tgaactgtggcccaatgtacggcgatcgcctgcacccggagatacctaca

SEQ ID NO: 66386 - DNA, 50 bp, synthetic construct
  source 1..50: mol_type = other DNA
accgtacataaacgaatgagcgaaagcggcagatggattttatcagcgta

SEQ ID NO: 66387 - DNA, 50 bp, synthetic construct
  source 1..50: mol_type = other DNA
cgatgcctatacgatccgcgatgagcagatcaaggatatgatagacttcg

SEQ ID NO: 66388 - DNA, 50 bp, synthetic construct
  source 1..50: mol_type = other DNA
acataacaaaatgttccctataaaatttcataaaacaaaaattgttcccg

SEQ ID NO: 66389 - DNA, 50 bp, synthetic construct
  source 1..50: mol_type = other DNA
aacgatatacttctcacgtctcttgtaggaggcagattatgtgtatatta

SEQ ID NO: 66390 - DNA, 50 bp, synthetic construct
  source 1..50: mol_type = other DNA
gctctggggatagtgttgcagccatatcataaagacagagaatatccccc

SEQ ID NO: 66391 - DNA, 50 bp, synthetic construct
  source 1..50: mol_type = other DNA
tgtgctgtctgttccatgctctgtccgccgttctgatttcaggtggcatc

SEQ ID NO: 66392 - DNA, 50 bp, synthetic construct
  source 1..50: mol_type = other DNA
cagctgattattgaagaacatttggcctctgcttctaccaccgtcagctc

SEQ ID NO: 66393 - DNA, 50 bp, synthetic construct
  source 1..50: mol_type = other DNA
tgttccgggtcaagggcgtgtcctgggggatatttccactcccgccgcgt

SEQ ID NO: 66394 - DNA, 50 bp, synthetic construct
  source 1..50: mol_type = other DNA
gctgatggcgggcaacagaaagcagcatcttctccaccaccggcaacacc

SEQ ID NO: 66395 - DNA, 50 bp, synthetic construct
  source 1..50: mol_type = other DNA
gcgatcaatgtgtttttgctattttccccctccgcaagcgcatcaatcag

SEQ ID NO: 66396 - DNA, 50 bp, synthetic construct
  source 1..50: mol_type = other DNA
aatggatttggacggggcattgtttgagtctatgaccgccgtaatctatg

SEQ ID NO: 66397 - DNA, 50 bp, synthetic construct
  source 1..50: mol_type = other DNA
cctttaatttcccgtcatgccgtgataatgatatgaagcggcaacaatgt

SEQ ID NO: 66398 - DNA, 50 bp, synthetic construct
  source 1..50: mol_type = other DNA
tgagtaaaatttgtacccaaacagtactgtcagttgacgaagaaaaagac

SEQ ID NO: 66399 - DNA, 50 bp, synthetic construct
  source 1..50: mol_type = other DNA
aattgtcaagttgtttttggcataattatatcttccacaaatgaatgcgc

SEQ ID NO: 66400 - DNA, 50 bp, synthetic construct
  source 1..50: mol_type = other DNA
cagtgaataccgtgccctttggcacgtgcccccgctctccgtatgcagca

SEQ ID NO: 66401 - DNA, 50 bp, synthetic construct
  source 1..50: mol_type = other DNA
tgtgcaatccgtgcaagggtgcggcggcagcggcacggccgggcggcgag

SEQ ID NO: 66402 - DNA, 50 bp, synthetic construct
  source 1..50: mol_type = other DNA
gcggtcaaccaggctcttgagcggatgaagcagagatccttggagaaccg

SEQ ID NO: 66403 - DNA, 50 bp, synthetic construct
  source 1..50: mol_type = other DNA
tatatcagcagcgactacggctacgcttagacggattcttcgacaaggta

SEQ ID NO: 66404 - DNA, 50 bp, synthetic construct
  source 1..50: mol_type = other DNA
attgtggaggagaaaggcagcctgaccgttctgccatttcgcaccgtgta

SEQ ID NO: 66405 - DNA, 50 bp, synthetic construct
  source 1..50: mol_type = other DNA
gatctgaatttccacaagccttacctatgctgtctttggaatttcagaga

SEQ ID NO: 66406 - DNA, 50 bp, synthetic construct
  source 1..50: mol_type = other DNA
atggcctccaaacaaaaaaggcccgcgggctatgccttttcggatggctc

SEQ ID NO: 66407 - DNA, 50 bp, synthetic construct
  source 1..50: mol_type = other DNA
tatcttattgaaaaatatggaaaaggtaaatgaactcctgaaataaggat

SEQ ID NO: 66408 - DNA, 50 bp, synthetic construct
  source 1..50: mol_type = other DNA
aggtaggtcatcatggctctaagtatattcagagaaaggatgataagaat

SEQ ID NO: 66409 - DNA, 50 bp, synthetic construct
  source 1..50: mol_type = other DNA
atgaaaggaacgatacattatgacagccgtggtcgggtcgttcccgccaa

SEQ ID NO: 66410 - DNA, 50 bp, synthetic construct
  source 1..50: mol_type = other DNA
atgctttgttttgtttgaccttaaaaggaaggtgaaaggtatcaaagaaa

SEQ ID NO: 66411 - DNA, 50 bp, synthetic construct
  source 1..50: mol_type = other DNA
tgattagtaccgaatcttgttgtatatcgcggaagaccgcccacgatgat

SEQ ID NO: 66412 - DNA, 50 bp, synthetic construct
  source 1..50: mol_type = other DNA
cgcaggtttgagcgcctgcgggctttctgacgcaggggctcagccctgcg

SEQ ID NO: 66413 - DNA, 50 bp, synthetic construct
  source 1..50: mol_type = other DNA
ctgcaaattatacattcgtgcatatttatgcaaaaatatctaatgtacct

SEQ ID NO: 66414 - DNA, 50 bp, synthetic construct
  source 1..50: mol_type = other DNA
ttttaaagttcataaactttacataaatgtacgatttccaaatttgcaca

SEQ ID NO: 66415 - DNA, 50 bp, synthetic construct
  source 1..50: mol_type = other DNA
tgtcggataggaacggcaaaattttttgccgctgtacagcccccgccgtt

SEQ ID NO: 66416 - DNA, 50 bp, synthetic construct
  source 1..50: mol_type = other DNA
ccaacatagtttacatactccattataatcataaatacaaccaatgttgt

SEQ ID NO: 66417 - DNA, 50 bp, synthetic construct
  source 1..50: mol_type = other DNA
agtccaaggacaatgtttgtattttcaaagaaaaacataaattatacaca

SEQ ID NO: 66418 - DNA, 50 bp, synthetic construct
  source 1..50: mol_type = other DNA
ttataggtgtcgatagcacacttgatggccagtgctgacgcgggcatatc

SEQ ID NO: 66419 - DNA, 50 bp, synthetic construct
  source 1..50: mol_type = other DNA
gttatttctattatttatttgcataaatcagcacgtataataaaaacata

SEQ ID NO: 66420 - DNA, 50 bp, synthetic construct
  source 1..50: mol_type = other DNA
ggatatataatcgttgacggaaaggctcgtccgtttccggctgggacaaa

SEQ ID NO: 66421 - DNA, 50 bp, synthetic construct
  source 1..50: mol_type = other DNA
tacacatcgggatacagttcccgaagtggggacatttgatgggaaatgtt

SEQ ID NO: 66422 - DNA, 50 bp, synthetic construct
  source 1..50: mol_type = other DNA
ttgatctgcatttctgactgtttttagaaaaagtcagcaaacaagccgaa

SEQ ID NO: 66423 - DNA, 50 bp, synthetic construct
  source 1..50: mol_type = other DNA
tgcagaagcatccgatcaggatgttgacttgctctttttatgcttcgatg

SEQ ID NO: 66424 - DNA, 50 bp, synthetic construct
  source 1..50: mol_type = other DNA
gaattgtagtgatgctattttaccatgaaatgataaaatggcttgaaacc

SEQ ID NO: 66425 - DNA, 50 bp, synthetic construct
  source 1..50: mol_type = other DNA
cggtttcaagggtataattatcggtataatcatttatatctaataactta

SEQ ID NO: 66426 - DNA, 50 bp, synthetic construct
  source 1..50: mol_type = other DNA
gccgaggggttaaatttagctttccaatttcgtaaaggttcattcttttc

SEQ ID NO: 66427 - DNA, 50 bp, synthetic construct
  source 1..50: mol_type = other DNA
tggcgtcccctttccgttttcgttgcagttctaccgcttttggtaagaag

SEQ ID NO: 66428 - DNA, 50 bp, synthetic construct
  source 1..50: mol_type = other DNA
cttgcctgaccggattttcataattcgttatgaaaatgaagtgctaatct

SEQ ID NO: 66429 - DNA, 50 bp, synthetic construct
  source 1..50: mol_type = other DNA
catagttatgggaagaccgatgaagcttcatctgtcactgccttaccatt

SEQ ID NO: 66430 - DNA, 50 bp, synthetic construct
  source 1..50: mol_type = other DNA
tgtattttcgggggcagaagaagagtgcgcaaacggaaattcaaagtaat

SEQ ID NO: 66431 - DNA, 50 bp, synthetic construct
  source 1..50: mol_type = other DNA
ggcgctgactcgtgctgtggacgtgcctttcagcaggaggtgtgggcgct

SEQ ID NO: 66432 - DNA, 50 bp, synthetic construct
  source 1..50: mol_type = other DNA
ttttttacgtttataatttccaacatgttggaaataataaagggatggta

SEQ ID NO: 66433 - DNA, 50 bp, synthetic construct
  source 1..50: mol_type = other DNA
ggaaaatttgatgtggtagtctgatttcagactacgacctcaatctgctc

SEQ ID NO: 66434 - DNA, 50 bp, synthetic construct
  source 1..50: mol_type = other DNA
cgcgggaaataaggagcgcatcaccattattgggtacattatttgccgca

SEQ ID NO: 66435 - DNA, 50 bp, synthetic construct
  source 1..50: mol_type = other DNA
ctgttacccgttacgcccttctgcgcagaggccccagcgccgcttaaccg

SEQ ID NO: 66436 - DNA, 50 bp, synthetic construct
  source 1..50: mol_type = other DNA
tcttgaaggcaatccagttcccgggggcaagcgctgcatttatgaatccc

SEQ ID NO: 66437 - DNA, 50 bp, synthetic construct
  source 1..50: mol_type = other DNA
gttgcgtggcagcttcatcctgtgccactagggtgcgatttgtgcgcaat

SEQ ID NO: 66438 - DNA, 50 bp, synthetic construct
  source 1..50: mol_type = other DNA
tcgacatttggaaactcgccggtcggctgaaagctggacaccggaaatga

SEQ ID NO: 66439 - DNA, 50 bp, synthetic construct
  source 1..50: mol_type = other DNA
aaaggggcggatggcaacatgtccagggacatgttgcagaataaaaaatc

SEQ ID NO: 66440 - DNA, 50 bp, synthetic construct
  source 1..50: mol_type = other DNA
gatatacccatggaaaagctcgtagcttccagctttttcagtatttcttc

SEQ ID NO: 66441 - DNA, 50 bp, synthetic construct
  source 1..50: mol_type = other DNA
attctttattcgaggttgactaaagacggagttaaccggcgacgaagaat

SEQ ID NO: 66442 - DNA, 50 bp, synthetic construct
  source 1..50: mol_type = other DNA
ttttgcgtaaatctctattttttctttgcaaagattaactctctgcaaag

SEQ ID NO: 66443 - DNA, 50 bp, synthetic construct
  source 1..50: mol_type = other DNA
cacataaggattcgcgctttatcaaaggcaaaaccggggatccacgctca

SEQ ID NO: 66444 - DNA, 50 bp, synthetic construct
  source 1..50: mol_type = other DNA
ttttgtagcggcggcagaccgccatagaaaaaggagcaatcgaaatgaaa

SEQ ID NO: 66445 - DNA, 50 bp, synthetic construct
  source 1..50: mol_type = other DNA
gcaaactcgcgggcaatgtactcttccagcggcatttccccggaaaagca

SEQ ID NO: 66446 - DNA, 50 bp, synthetic construct
  source 1..50: mol_type = other DNA
ccgaaagcggaacaggtcggtggcttgctaccgaagcagtcggcaacgcc

SEQ ID NO: 66447 - DNA, 50 bp, synthetic construct
  source 1..50: mol_type = other DNA
tgttttgtatatttcgcgacaggaatacgtgtgagttgttatataaagga

SEQ ID NO: 66448 - DNA, 50 bp, synthetic construct
  source 1..50: mol_type = other DNA
acgcgtacgtcgtgttcacaaacgacgatttcaaaacacggaggttatat

SEQ ID NO: 66449 - DNA, 50 bp, synthetic construct
  source 1..50: mol_type = other DNA
aaatgataatcgtcttcggagatggcatcatccgtagatgattattgttc

SEQ ID NO: 66450 - DNA, 50 bp, synthetic construct
  source 1..50: mol_type = other DNA
aatagcaagtcttttctgccagacctttcctccataaataatatgatatc

SEQ ID NO: 66451 - DNA, 50 bp, synthetic construct
  source 1..50: mol_type = other DNA
gatttgcattttccgtgtaatcggccgaacacaaaaagaaaaaacaaatc

SEQ ID NO: 66452 - DNA, 50 bp, synthetic construct
  source 1..50: mol_type = other DNA
cttcttcttttttgccattatccatcctgccgctggccaaagagaagaag

SEQ ID NO: 66453 - DNA, 50 bp, synthetic construct
  source 1..50: mol_type = other DNA
catatatagaacaacattcattgccttatatgtatatgtccctatatact

SEQ ID NO: 66454 - DNA, 50 bp, synthetic construct
  source 1..50: mol_type = other DNA
caacatttactgcccttggaaattgcgccaggccggtggtgtaggaattg

SEQ ID NO: 66455 - DNA, 50 bp, synthetic construct
  source 1..50: mol_type = other DNA
cgcttgacaacgtccctgacggcggacgcacagccggacaaggtcgagcg

SEQ ID NO: 66456 - DNA, 50 bp, synthetic construct
  source 1..50: mol_type = other DNA
gctttcatccatcgtgttgtcgtctatcatgaatcagccccatttgccta

SEQ ID NO: 66457 - DNA, 50 bp, synthetic construct
  source 1..50: mol_type = other DNA
taggcgaatggggccgattcatgatatagcccgtcagcgcgtacgccgta

SEQ ID NO: 66458 - DNA, 50 bp, synthetic construct
  source 1..50: mol_type = other DNA
atggcgtctgtattcgctgcggcagaaagagcaggccagacagcgggcat

SEQ ID NO: 66459 - DNA, 50 bp, synthetic construct
  source 1..50: mol_type = other DNA
ttgtccgtcttggcggagatagcacgtgcagaccccgatttttcggggtt

SEQ ID NO: 66460 - DNA, 50 bp, synthetic construct
  source 1..50: mol_type = other DNA
taggagaatttatgtgccaatgtcaagacattttcgaatcatttctcctg

SEQ ID NO: 66461 - DNA, 50 bp, synthetic construct
  source 1..50: mol_type = other DNA
ccatgaaaaagctataccggatgtgcagttttggtagcgcgcttgaatgg

SEQ ID NO: 66462 - DNA, 50 bp, synthetic construct
  source 1..50: mol_type = other DNA
ttcctcaatggctctaatatactccgccatattataaccgcatgaaagaa

SEQ ID NO: 66463 - DNA, 50 bp, synthetic construct
  source 1..50: mol_type = other DNA
agggtaatctttagaaagagaacagaaattcacaatcacggatagatact

SEQ ID NO: 66464 - DNA, 50 bp, synthetic construct
  source 1..50: mol_type = other DNA
agaattgtttactcgaaaaatattctaccattcatcaggtagacaaagac

SEQ ID NO: 66465 - DNA, 50 bp, synthetic construct
  source 1..50: mol_type = other DNA
tctgcataaactgagacaccagcttctgtaggaggtggaatttatgcaga

SEQ ID NO: 66466 - DNA, 50 bp, synthetic construct
  source 1..50: mol_type = other DNA
ctcttttttcttgcttcttttctactggaaaaaggaatggtaacacagct

SEQ ID NO: 66467 - DNA, 50 bp, synthetic construct
  source 1..50: mol_type = other DNA
ttcatatacatacttttcagtagcatgactgtccgtaaaaagtatttaat

SEQ ID NO: 66468 - DNA, 50 bp, synthetic construct
  source 1..50: mol_type = other DNA
aatgcatgataaaagatccggagcgctggctgtattttttatacccattt

SEQ ID NO: 66469 - DNA, 50 bp, synthetic construct
  source 1..50: mol_type = other DNA
gtttgccaaatacaaggataacatatgtgttatgcttatacaaacaaaaa

SEQ ID NO: 66470 - DNA, 50 bp, synthetic construct
  source 1..50: mol_type = other DNA
gatgtggtaaaatagaggcatagaaatgaatttttcatcttctatatgct

SEQ ID NO: 66471 - DNA, 50 bp, synthetic construct
  source 1..50: mol_type = other DNA
atactagatatatctgcatatattttaacatttacagttatatatagtat

SEQ ID NO: 66472 - DNA, 50 bp, synthetic construct
  source 1..50: mol_type = other DNA
tcttcgggtagtgacatatttgctctatgttctatttcactacctctgtt

SEQ ID NO: 66473 - DNA, 50 bp, synthetic construct
  source 1..50: mol_type = other DNA
ctatttcataatggtggggttccggcattataagcattattaagaaatat

SEQ ID NO: 66474 - DNA, 50 bp, synthetic construct
  source 1..50: mol_type = other DNA
ggcgttgtagttggcaaaggtaaagcccctacggtgcaggggacgatgct

SEQ ID NO: 66475 - DNA, 50 bp, synthetic construct
  source 1..50: mol_type = other DNA
gttgggtatcttgttgttatctatacagctatggcaacaagatacataag

SEQ ID NO: 66476 - DNA, 50 bp, synthetic construct
  source 1..50: mol_type = other DNA
tgactgtctcataaagtcctcctttcggtgattttgttatgacaggcggc

SEQ ID NO: 66477 - DNA, 50 bp, synthetic construct
  source 1..50: mol_type = other DNA
atcttgattgataggatagatataattagtaaaatgtgatataataatat

SEQ ID NO: 66478 - DNA, 50 bp, synthetic construct
  source 1..50: mol_type = other DNA
cataatacacgctccttttttgtgtgatcagcaaacggccgaatattaaa

SEQ ID NO: 66479 - DNA, 50 bp, synthetic construct
  source 1..50: mol_type = other DNA
aatcatagcctttggtctcctttgccgaatgcgtcccaaatgctcatttg

SEQ ID NO: 66480 - DNA, 50 bp, synthetic construct
  source 1..50: mol_type = other DNA
attactcatagaatctatagaatacataatatatacggaggtgatatcat

SEQ ID NO: 66481 - DNA, 50 bp, synthetic construct
  source 1..50: mol_type = other DNA
aaaggtctaaaaaggacgctgctcagtgacaccgtattttttattgcttt

SEQ ID NO: 66482 - DNA, 50 bp, synthetic construct
  source 1..50: mol_type = other DNA
ttcggcgtgcagcttccttcatctcgagaccaaaaaagccctcgaggaaa

SEQ ID NO: 66483 - DNA, 50 bp, synthetic construct
  source 1..50: mol_type = other DNA
cggcaatatacagcgactgacattttacgtccgctgcctgaataagcggt

SEQ ID NO: 66484 - DNA, 50 bp, synthetic construct
  source 1..50: mol_type = other DNA
actaaaaaatgtaataatcctactgtcaaacagatattacatatattcca

SEQ ID NO: 66485 - DNA, 50 bp, synthetic construct
  source 1..50: mol_type = other DNA
catttgttacctgcagtatttttcggatgatgtcatgcaggaaacaaata

SEQ ID NO: 66486 - DNA, 50 bp, synthetic construct
  source 1..50: mol_type = other DNA
agagaataatgtgccgaaaagagggccacaccgcttgataaaagttctcg

SEQ ID NO: 66487 - DNA, 50 bp, synthetic construct
  source 1..50: mol_type = other DNA
tcgaagaagaaaattgatgttagaggtataaccggaatttacgtctgtgg

SEQ ID NO: 66488 - DNA, 50 bp, synthetic construct
  source 1..50: mol_type = other DNA
ataccggcgacgctgtcacgcttcacctcccgtgacattctctgctacgc

SEQ ID NO: 66489 - DNA, 50 bp, synthetic construct
  source 1..50: mol_type = other DNA
taagaactccgctgtcaaccatgaattcatgcttggtagcaccgtccttt

SEQ ID NO: 66490 - DNA, 50 bp, synthetic construct
  source 1..50: mol_type = other DNA
taccaaatcatccattttttcaaatatttgaaaaaatggaggtttttaat

SEQ ID NO: 66491 - DNA, 50 bp, synthetic construct
  source 1..50: mol_type = other DNA
gcgaccatgaaaaagatacggtacataccggccctttttttcatggaaag

SEQ ID NO: 66492 - DNA, 50 bp, synthetic construct
  source 1..50: mol_type = other DNA
gattgagggatcatccctctttctctttgtcacacgatccggcctcattc

SEQ ID NO: 66493 - DNA, 50 bp, synthetic construct
  source 1..50: mol_type = other DNA
ctgcaaatactgcctgcctgcaaggcaatgcagaagagtagtaatcactt

SEQ ID NO: 66494 - DNA, 50 bp, synthetic construct
  source 1..50: mol_type = other DNA
tgtattgcaaatgcgttgattgaacaatgaaacaacagatttacaatact

SEQ ID NO: 66495 - DNA, 50 bp, synthetic construct
  source 1..50: mol_type = other DNA
gatttgcacgccgctctttgtgttgaacgacaagcagcgggaagcggtct

SEQ ID NO: 66496 - DNA, 50 bp, synthetic construct
  source 1..50: mol_type = other DNA
gcgtttttcgctcgttgcatcttctagaagatgaagctaattaaataatg

SEQ ID NO: 66497 - DNA, 50 bp, synthetic construct
  source 1..50: mol_type = other DNA
acaagatttaaatgaacgtttgaaaaacttgtggtatccttgttgataaa

SEQ ID NO: 66498 - DNA, 50 bp, synthetic construct
  source 1..50: mol_type = other DNA
atggtttccgctttttgagttatttcaaaacgtcaaggagtgaaaacaat

SEQ ID NO: 66499 - DNA, 50 bp, synthetic construct
  source 1..50: mol_type = other DNA
atcatgctgatttctcctttccgatccggcaaaacgcgcaacagcatccg

SEQ ID NO: 66500 - DNA, 50 bp, synthetic construct
  source 1..50: mol_type = other DNA
ttaacgaacagactcagcgaaacatatgtttcgatgattcatgcttggta

SEQ ID NO: 66501 - DNA, 50 bp, synthetic construct
  source 1..50: mol_type = other DNA
atagcctccttctatgcgaaagggggccatgtcgattcgtaggagggtcc

SEQ ID NO: 66502 - DNA, 50 bp, synthetic construct
  source 1..50: mol_type = other DNA
aaaacttgattttttgcgttaaaactggatatatttcaaaatcagagtta

SEQ ID NO: 66503 - DNA, 50 bp, synthetic construct
  source 1..50: mol_type = other DNA
tgcggcgagacacacatctcacaggctggacggatgaaatgaaagccgcc

SEQ ID NO: 66504 - DNA, 50 bp, synthetic construct
  source 1..50: mol_type = other DNA
atgggtaaaatcatagtcacacttttaatcttgtcaaatgcattatttct

SEQ ID NO: 66505 - DNA, 50 bp, synthetic construct
  source 1..50: mol_type = other DNA
cacaaaagaaatttttattgagcgttcatgtgctggctgttatttttgta

SEQ ID NO: 66506 - DNA, 50 bp, synthetic construct
  source 1..50: mol_type = other DNA
tccagaccagattacctttcttcgtgagaagaaacttaaggtggctgctt

SEQ ID NO: 66507 - DNA, 50 bp, synthetic construct
  source 1..50: mol_type = other DNA
cgaatattagtgcagcaaatgcttcatcccgacggctcgatatttattat

SEQ ID NO: 66508 - DNA, 50 bp, synthetic construct
  source 1..50: mol_type = other DNA
gaatgtttttccacaatgtctgcacagaatgaccaaaaggaaaaaaatag

SEQ ID NO: 66509 - DNA, 50 bp, synthetic construct
  source 1..50: mol_type = other DNA
gcttttcgcttgacatactttctcaccgctccgtattccacgagaaaaac

SEQ ID NO: 66510 - DNA, 50 bp, synthetic construct
  source 1..50: mol_type = other DNA
agagagcgcgtcttgccgcactgtccgctgtgcggcaagactgtgaagct

SEQ ID NO: 66511 - DNA, 50 bp, synthetic construct
  source 1..50: mol_type = other DNA
gtgcgacaagctctttgctattgttgtcaccttgatagtgccttctgcct

SEQ ID NO: 66512 - DNA, 50 bp, synthetic construct
  source 1..50: mol_type = other DNA
ctgggctataccgatgacagctatacggcattgtcgtcaagggcgtggag

SEQ ID NO: 66513 - DNA, 50 bp, synthetic construct
  source 1..50: mol_type = other DNA
ctacaatgccgggtgctgttgcagaattattacagttctacaaattaaaa

SEQ ID NO: 66514 - DNA, 50 bp, synthetic construct
  source 1..50: mol_type = other DNA
taagatattcagacagacacactcttttttcttgctgtccacaggctttg

SEQ ID NO: 66515 - DNA, 50 bp, synthetic construct
  source 1..50: mol_type = other DNA
tttttttattcccgttagcttctaaaacgaagataacgaatttaaaacca

SEQ ID NO: 66516 - DNA, 50 bp, synthetic construct
  source 1..50: mol_type = other DNA
aagctcaacctctacggtacaaaaatgtacggaacgtatagcgaggattt

SEQ ID NO: 66517 - DNA, 50 bp, synthetic construct
  source 1..50: mol_type = other DNA
atcttttcagaatggtatcaccaaacgcttgtccacttttctgcaataat

SEQ ID NO: 66518 - DNA, 50 bp, synthetic construct
  source 1..50: mol_type = other DNA
acaaaaatgggtataaaaaatacagcattcagcttttccggcgtttttgt

SEQ ID NO: 66519 - DNA, 50 bp, synthetic construct
  source 1..50: mol_type = other DNA
gcgacaatgattttgtttgaaaaagctttttggaatagtaacattgccac

SEQ ID NO: 66520 - DNA, 50 bp, synthetic construct
  source 1..50: mol_type = other DNA
cctaaatttgtaattaaggctccaattgccccctcccctgccaaattcca

SEQ ID NO: 66521 - DNA, 50 bp, synthetic construct
  source 1..50: mol_type = other DNA
gttttcttgaatacctttcacctttctgccgtataggtcttctgcagaag

SEQ ID NO: 66522 - DNA, 50 bp, synthetic construct
  source 1..50: mol_type = other DNA
gttgatcttctaccaaggccaactcgttctggatcagctttaagatcttc

SEQ ID NO: 66523 - DNA, 50 bp, synthetic construct
  source 1..50: mol_type = other DNA
atgtacgtgctttatgagtaggagatataaacgattatatgcatgtaaat

SEQ ID NO: 66524 - DNA, 50 bp, synthetic construct
  source 1..50: mol_type = other DNA
caggtgtaaataaatatgctataattttatatcatatttttgtttgtaat

SEQ ID NO: 66525 - DNA, 50 bp, synthetic construct
  source 1..50: mol_type = other DNA
accatcgagaagcagacaacacccgaccgtagccgagtgccgttcctgtc

SEQ ID NO: 66526 - DNA, 50 bp, synthetic construct
  source 1..50: mol_type = other DNA
ccgagtagcccgacttctatcaggcggctgatggtagccgggatcgccgt

SEQ ID NO: 66527 - DNA, 50 bp, synthetic construct
  source 1..50: mol_type = other DNA
ctttttgtgttcgatcatattcgttcacagtcaacatctaaagcaccgtt

SEQ ID NO: 66528 - DNA, 50 bp, synthetic construct
  source 1..50: mol_type = other DNA
acggagcggttttctctcatatttgaaaatatgagaggagagaactaaaa

SEQ ID NO: 66529 - DNA, 50 bp, synthetic construct
  source 1..50: mol_type = other DNA
aatcaaagttttctgatatagataagtagaagaatcagaaaatatagatt

SEQ ID NO: 66530 - DNA, 50 bp, synthetic construct
  source 1..50: mol_type = other DNA
gctctgttacaggcttaacaataaatttggaatatcttcgtgtagtttat

SEQ ID NO: 66531 - DNA, 50 bp, synthetic construct
  source 1..50: mol_type = other DNA
ggtcttggggaataattaaaaaatgcatttggttcagaggaataattaaa

SEQ ID NO: 66532 - DNA, 50 bp, synthetic construct
  source 1..50: mol_type = other DNA
gcattgtacgcttgtttttccattcgattggaaaaaggattttacagagg

SEQ ID NO: 66533 - DNA, 50 bp, synthetic construct
  source 1..50: mol_type = other DNA
ggccgccaccgtcctgcgcttccccgggcgtaggcagcggtgcggcgttt

SEQ ID NO: 66534 - DNA, 50 bp, synthetic construct
  source 1..50: mol_type = other DNA
gaatctatgcgtgtggtttttctccaatactcacggacaaatctacacaa

SEQ ID NO: 66535 - DNA, 50 bp, synthetic construct
  source 1..50: mol_type = other DNA
acacgagatgtaataaaaaatgtactgtcatttacatcaccaacctttcc

SEQ ID NO: 66536 - DNA, 50 bp, synthetic construct
  source 1..50: mol_type = other DNA
gtagaagctgaccgcacaggccgtgcacggctgcgaatgatttcaactat

SEQ ID NO: 66537 - DNA, 50 bp, synthetic construct
  source 1..50: mol_type = other DNA
tttgttaatctatttaaaacttcctttagagtgatatatagactacccta

SEQ ID NO: 66538 - DNA, 50 bp, synthetic construct
  source 1..50: mol_type = other DNA
aaacttcctttaaaagagggggaaagactgcccttacagaaaggaagatt

SEQ ID NO: 66539 - DNA, 50 bp, synthetic construct
  source 1..50: mol_type = other DNA
tcttccatagcaatacctcccagaacggatcgaattattgtcccggataa

SEQ ID NO: 66540 - DNA, 50 bp, synthetic construct
  source 1..50: mol_type = other DNA
ttttggtgattttttgttgtagttatcaggacaacatcgcctgcgctaat

SEQ ID NO: 66541 - DNA, 50 bp, synthetic construct
  source 1..50: mol_type = other DNA
agtactttctttagctggtctcgcgcttccgaccccataaatccgatatc

SEQ ID NO: 66542 - DNA, 50 bp, synthetic construct
  source 1..50: mol_type = other DNA
gttagtgctattcttgcttcagttgaaaggaaggtgagactatgaaacga

SEQ ID NO: 66543 - DNA, 50 bp, synthetic construct
  source 1..50: mol_type = other DNA
aatcctaattgggactttactggttgaaatacaaagatccaattaagcag

SEQ ID NO: 66544 - DNA, 50 bp, synthetic construct
  source 1..50: mol_type = other DNA
tgtcggcgtgagcggtctttccatatgacggaattgatcgaaaagctgcg

SEQ ID NO: 66545 - DNA, 50 bp, synthetic construct
  source 1..50: mol_type = other DNA
gtcaaggtacaaatctgcattgatatatcctcatcaatttttaccttgaa

SEQ ID NO: 66546 - DNA, 50 bp, synthetic construct
  source 1..50: mol_type = other DNA
aactcgctttctttggccttggtgtgggattcttcccaagacggcgcttt

SEQ ID NO: 66547 - DNA, 50 bp, synthetic construct
  source 1..50: mol_type = other DNA
acaacaaaacagatgcctctgcaggattgcccctgccagcctgggtctgt

SEQ ID NO: 66548 - DNA, 50 bp, synthetic construct
  source 1..50: mol_type = other DNA
gtttcggaggatatagcaagtccatatactctttctatagtttccaagaa

SEQ ID NO: 66549 - DNA, 50 bp, synthetic construct
  source 1..50: mol_type = other DNA
caattggtgcatggtatttttccgcagcggataaaacccttctccagctt

SEQ ID NO: 66550 - DNA, 50 bp, synthetic construct
  source 1..50: mol_type = other DNA
acccggaaaggagagcgcttgtgaattttgaagaagataatcgtgaggtg

SEQ ID NO: 66551 - DNA, 50 bp, synthetic construct
  source 1..50: mol_type = other DNA
agaagtcctttcataaccagaaaaagcgttttggtgaattgcgtcattct

SEQ ID NO: 66552 - DNA, 50 bp, synthetic construct
  source 1..50: mol_type = other DNA
aataaagttcatagaaaattttataatagagcgaatcattgttgaagcga

SEQ ID NO: 66553 - DNA, 50 bp, synthetic construct
  source 1..50: mol_type = other DNA
taggaggatttattcttgcagtcttgggagtgccccggttcatccggtga

SEQ ID NO: 66554 - DNA, 50 bp, synthetic construct
  source 1..50: mol_type = other DNA
ttatgcccggtcggctcgggcggttgcagttgttcctggctgaggctgga

SEQ ID NO: 66555 - DNA, 50 bp, synthetic construct
  source 1..50: mol_type = other DNA
ctttggtcctgatgacccatctgccggttgatacgcgcgcatacgcagcc

SEQ ID NO: 66556 - DNA, 50 bp, synthetic construct
  source 1..50: mol_type = other DNA
ggtcatggcgctgatactggacgatgtcgggcagaccccggccggtttcc

SEQ ID NO: 66557 - DNA, 50 bp, synthetic construct
  source 1..50: mol_type = other DNA
agacgctgggcgaaaagctgctggacgcccccgctattttgggagcgttt

SEQ ID NO: 66558 - DNA, 50 bp, synthetic construct
  source 1..50: mol_type = other DNA
gggcggtggtttttgtcttgcttccaatgtgctttcaaaaatatcacccc

SEQ ID NO: 66559 - DNA, 50 bp, synthetic construct
  source 1..50: mol_type = other DNA
gccttatcatagatcttcacattctggaatgtggaacggaaagccaattt

SEQ ID NO: 66560 - DNA, 50 bp, synthetic construct
  source 1..50: mol_type = other DNA
gcctgcagatagtttctacgttcgcagtccgaatttctttgcctgcaagc

SEQ ID NO: 66561 - DNA, 50 bp, synthetic construct
  source 1..50: mol_type = other DNA
gcaaagaatgccgctgcttttttttaacaagaagttttttgattatgtaa

SEQ ID NO: 66562 - DNA, 50 bp, synthetic construct
  source 1..50: mol_type = other DNA
tctcattactctcacctctcgtttttaaacagaatatcattatacaatga

SEQ ID NO: 66563 - DNA, 50 bp, synthetic construct
  source 1..50: mol_type = other DNA
aggccttcaataaaagcttttagtgtttccgaatagtttatacggaaacc

SEQ ID NO: 66564 - DNA, 50 bp, synthetic construct
  source 1..50: mol_type = other DNA
gtcttttccttatactttacctccagcacaaaaccggacaaagaaaattt

SEQ ID NO: 66565 - DNA, 50 bp, synthetic construct
  source 1..50: mol_type = other DNA
ttgtcagtatcggcttccatattccttgacccggaagccgataccatcat

SEQ ID NO: 66566 - DNA, 50 bp, synthetic construct
  source 1..50: mol_type = other DNA
tcttaaataaatacaatatgacatatattaacaatctaaaaaatagaaag

SEQ ID NO: 66567 - DNA, 50 bp, synthetic construct
  source 1..50: mol_type = other DNA
attagagaaatttctttctttatctcctcagggtcggcattttcactaag

SEQ ID NO: 66568 - DNA, 50 bp, synthetic construct
  source 1..50: mol_type = other DNA
atataggctctgaggttattccaacataaagaaacccttatagtcaatat

SEQ ID NO: 66569 - DNA, 50 bp, synthetic construct
  source 1..50: mol_type = other DNA
ttagaaaacggtgtcatatcagaatcttctgataagatagtatttcgatc

SEQ ID NO: 66570 - DNA, 50 bp, synthetic construct
  source 1..50: mol_type = other DNA
ccctccatttcgctttcattaccttgaaatggcgaaagaagacgaggatg

SEQ ID NO: 66571 - DNA, 50 bp, synthetic construct
  source 1..50: mol_type = other DNA
tccagcgacatgcgtgaatcagcttctgctggttgattggcattgctgta

SEQ ID NO: 66572 - DNA, 50 bp, synthetic construct
  source 1..50: mol_type = other DNA
aagaaaatcatttatcgcaagtctgacacctggcaataggtgttattttt

SEQ ID NO: 66573 - DNA, 50 bp, synthetic construct
  source 1..50: mol_type = other DNA
aaccaagcaggcgtatgagcagaaattttgaaaatttcaattattatctt

SEQ ID NO: 66574 - DNA, 50 bp, synthetic construct
  source 1..50: mol_type = other DNA
atgaccggcaatgtggacgcagacaaatgactgtcctgtataacacacag

SEQ ID NO: 66575 - DNA, 50 bp, synthetic construct
  source 1..50: mol_type = other DNA
ggaatatcctcggcgccattttatctatgatcttattattgctaaataca

SEQ ID NO: 66576 - DNA, 50 bp, synthetic construct
  source 1..50: mol_type = other DNA
ttccggcggaatccctatctgctgatggacagctcgctatttttacggaa

SEQ ID NO: 66577 - DNA, 50 bp, synthetic construct
  source 1..50: mol_type = other DNA
cttttttccgataccgtttgttttctcaaaacatcgcttttaacaagaag

SEQ ID NO: 66578 - DNA, 50 bp, synthetic construct
  source 1..50: mol_type = other DNA
taatacaatatggtggctgtgacggtaaacacaaacacatttttttcata

SEQ ID NO: 66579 - DNA, 50 bp, synthetic construct
  source 1..50: mol_type = other DNA
aataaaacccctgcggatttagtgacagcaaaatcggcatcaaaacggcg

SEQ ID NO: 66580 - DNA, 50 bp, synthetic construct
  source 1..50: mol_type = other DNA
tctttttaacttctggtataataatattcagaaaaaagaagatagtaaaa

SEQ ID NO: 66581 - DNA, 50 bp, synthetic construct
  source 1..50: mol_type = other DNA
gctttacattgccaaagaagacagcacttaaacctttggtgagctgccgg

SEQ ID NO: 66582 - DNA, 50 bp, synthetic construct
  source 1..50: mol_type = other DNA
acttcctatataaatacccaacaaatttgttggatggagaaaaaacacag

SEQ ID NO: 66583 - DNA, 50 bp, synthetic construct
  source 1..50: mol_type = other DNA
aggaatctgaacaccaggcttccgtccgatagcctgtttatgctcatcac

SEQ ID NO: 66584 - DNA, 50 bp, synthetic construct
  source 1..50: mol_type = other DNA
tcactctgtttgatacaattatcaagtaaggtttgtattcttttctatcg

SEQ ID NO: 66585 - DNA, 50 bp, synthetic construct
  source 1..50: mol_type = other DNA
ccgcaagaaaaaaggaatgcctccgatcaggcattccgcatttaccgtat

SEQ ID NO: 66586 - DNA, 50 bp, synthetic construct
  source 1..50: mol_type = other DNA
tgcggtgatgggaaaccggaagcagcgtgtccccgatctccagcaggctc

SEQ ID NO: 66587 - DNA, 50 bp, synthetic construct
  source 1..50: mol_type = other DNA
aggtggaaagatgatttttgtaaccggtggttgaaatcatggtgggactg

SEQ ID NO: 66588 - DNA, 50 bp, synthetic construct
  source 1..50: mol_type = other DNA
tataagcaacacattccatagtttataattctcatgcttctgttcgtatc

SEQ ID NO: 66589 - DNA, 50 bp, synthetic construct
  source 1..50: mol_type = other DNA
aataatcacttctatcttctttgagctcatacatgatggaagtgattatt

SEQ ID NO: 66590 - DNA, 50 bp, synthetic construct
  source 1..50: mol_type = other DNA
gtttaatgaaggaaaaaaggggactagtccaccatttagggcataaaaaa

SEQ ID NO: 66591 - DNA, 50 bp, synthetic construct
  source 1..50: mol_type = other DNA
cagcttcacagttttgaagcccaggtcaggaaaagaatactgggcagcaa

SEQ ID NO: 66592 - DNA, 50 bp, synthetic construct
  source 1..50: mol_type = other DNA
ccacatgttgcatttttttataatatatagtatataagtatataaaaata

SEQ ID NO: 66593 - DNA, 50 bp, synthetic construct
  source 1..50: mol_type = other DNA
ttctgcgaaatcgcccgtgagatattaatccgcaggtcgattccgcagtt

SEQ ID NO: 66594 - DNA, 50 bp, synthetic construct
  source 1..50: mol_type = other DNA
aatgggttagagaaggaaaaattaaataatttttgtaaagctcacgaatc

SEQ ID NO: 66595 - DNA, 50 bp, synthetic construct
  source 1..50: mol_type = other DNA
tcccatcaaataacctcgctttctatagaaaaagttaatataaagcaatt

SEQ ID NO: 66596 - DNA, 50 bp, synthetic construct
  source 1..50: mol_type = other DNA
caacgaatgataaaggtcaattacatgaatctgaccttttataatcattt

SEQ ID NO: 66597 - DNA, 50 bp, synthetic construct
  source 1..50: mol_type = other DNA
actgtggttcgttttacggtcataagccagaagaaaaaagtaactggaag

SEQ ID NO: 66598 - DNA, 50 bp, synthetic construct
  source 1..50: mol_type = other DNA
ttcatgtattctatccgtgatacaattatatcacagtgaggcttttaccg

SEQ ID NO: 66599 - DNA, 50 bp, synthetic construct
  source 1..50: mol_type = other DNA
catcaattgttccaatagtacaaagtgctgtattcttgattatattcttc

SEQ ID NO: 66600 - DNA, 50 bp, synthetic construct
  source 1..50: mol_type = other DNA
attatatcaagtcattttccgataattgacggattctcttttggcaaaat

SEQ ID NO: 66601 - DNA, 50 bp, synthetic construct
  source 1..50: mol_type = other DNA
aaagataaaaaatgatattatattatgcgataatattactcttaatgttc

SEQ ID NO: 66602 - DNA, 50 bp, synthetic construct
  source 1..50: mol_type = other DNA
ttgtaggccagcacctcggcctgattgcaggccgatgttgcggccttaaa

SEQ ID NO: 66603 - DNA, 50 bp, synthetic construct
  source 1..50: mol_type = other DNA
ttattataccgtcagcagccccgcaatctgggttgcaaacagtgtaataa

SEQ ID NO: 66604 - DNA, 50 bp, synthetic construct
  source 1..50: mol_type = other DNA
acagatcaggaagaacagttgaacagtttatgcaaatgaatttgataatt

SEQ ID NO: 66605 - DNA, 50 bp, synthetic construct
  source 1..50: mol_type = other DNA
ttttgtgtaaacgttaaaaactgatagggcatgataacggaaacactttt

SEQ ID NO: 66606 - DNA, 50 bp, synthetic construct
  source 1..50: mol_type = other DNA
gttgacggcagaccgaaggtacatgaagaaacctacggtacgccgtctca

SEQ ID NO: 66607 - DNA, 50 bp, synthetic construct
  source 1..50: mol_type = other DNA
gcagcacagaagcaataaggcgctcggaggatttcctgctgaagatctcc

SEQ ID NO: 66608 - DNA, 50 bp, synthetic construct
  source 1..50: mol_type = other DNA
cattcaagcgcgctaccaaaactgcgcagtatagtagccgtgcagggtgt

SEQ ID NO: 66609 - DNA, 50 bp, synthetic construct
  source 1..50: mol_type = other DNA
tatatctgcaaatattttatctactagtagatttaacatttacaattata

SEQ ID NO: 66610 - DNA, 50 bp, synthetic construct
  source 1..50: mol_type = other DNA
agtgaagaaatgttaaatttttttagaattggttatagcatttcttagct

SEQ ID NO: 66611 - DNA, 50 bp, synthetic construct
  source 1..50: mol_type = other DNA
aagaacctcatcgtctcacctcccaaaaacgcggagaagaacggttatcc

SEQ ID NO: 66612 - DNA, 50 bp, synthetic construct
  source 1..50: mol_type = other DNA
atcatttttttggtgttcattataattttatcatgtaccagtcaaacagc

SEQ ID NO: 66613 - DNA, 50 bp, synthetic construct
  source 1..50: mol_type = other DNA
caaagatgtcaaagacgtatttgctgttcaactgttcttcctgatctgta

SEQ ID NO: 66614 - DNA, 50 bp, synthetic construct
  source 1..50: mol_type = other DNA
tagcaagtgacccgtgcgggaatcgaatctcccgggcgctttacttttta

SEQ ID NO: 66615 - DNA, 50 bp, synthetic construct
  source 1..50: mol_type = other DNA
tcttactaatgtttctattgtatttaaaagcattagaaaattacacaaag

SEQ ID NO: 66616 - DNA, 50 bp, synthetic construct
  source 1..50: mol_type = other DNA
aagcagaaggaacaagggggtgcagcaacaagaagttctaccgtctgaac

SEQ ID NO: 66617 - DNA, 50 bp, synthetic construct
  source 1..50: mol_type = other DNA
ttcttatatatgaattatccggatatgtcaatatatttcatatcttataa

SEQ ID NO: 66618 - DNA, 50 bp, synthetic construct
  source 1..50: mol_type = other DNA
acttgctctaatatgaaatgaactcttgttcatcgacaacaaagtctttt

SEQ ID NO: 66619 - DNA, 50 bp, synthetic construct
  source 1..50: mol_type = other DNA
atatatcaagtgttattgggctattttagatctaataatatcacatatac

SEQ ID NO: 66620 - DNA, 50 bp, synthetic construct
  source 1..50: mol_type = other DNA
aaaaaataacagagatttttatactagcataacaatcacaaaaaaataat

SEQ ID NO: 66621 - DNA, 50 bp, synthetic construct
  source 1..50: mol_type = other DNA
gcggtcctcccgtttgggagaggccggaatttgatacaaggagggacaag

SEQ ID NO: 66622 - DNA, 50 bp, synthetic construct
  source 1..50: mol_type = other DNA
acagctttttctttttttactggcaagtcaggaccatgagaaaaaacggc

SEQ ID NO: 66623 - DNA, 50 bp, synthetic construct
  source 1..50: mol_type = other DNA
gccagtggcagcggcctcttttttgcaaaaatgaggacgttcctataata

SEQ ID NO: 66624 - DNA, 50 bp, synthetic construct
  source 1..50: mol_type = other DNA
aaaccttggaaggctcgacagaagatatttaagcgagatttatcagtaat

SEQ ID NO: 66625 - DNA, 50 bp, synthetic construct
  source 1..50: mol_type = other DNA
tgggtcatacaccttacggctacagcaacgaggccgctgtcatcgacgcg

SEQ ID NO: 66626 - DNA, 50 bp, synthetic construct
  source 1..50: mol_type = other DNA
gagtctggtggattttgtgacggtataccgtcctgttttcggcacattat

SEQ ID NO: 66627 - DNA, 50 bp, synthetic construct
  source 1..50: mol_type = other DNA
cggctttgtacttccaagccgccataaaatgatttacatagacaaaacca

SEQ ID NO: 66628 - DNA, 50 bp, synthetic construct
  source 1..50: mol_type = other DNA
catttggatatataatcgttgacggaggtcagtgttttcatcagcaaggc

SEQ ID NO: 66629 - DNA, 50 bp, synthetic construct
  source 1..50: mol_type = other DNA
ggatgtataatttcatagctacacaaggcgggcaatgatcttatccatcc

SEQ ID NO: 66630 - DNA, 50 bp, synthetic construct
  source 1..50: mol_type = other DNA
ataaaattttaaaccgtaaattaattttatttttatttttaaaatactac

SEQ ID NO: 66631 - DNA, 50 bp, synthetic construct
  source 1..50: mol_type = other DNA
ttctatataatcaagaaacaaatgaactaccgtgaagaaggtaaccaaaa

SEQ ID NO: 66632 - DNA, 50 bp, synthetic construct
  source 1..50: mol_type = other DNA
atgcaagggtaagattatctacccttttttacataatattcaatggaagg

SEQ ID NO: 66633 - DNA, 50 bp, synthetic construct
  source 1..50: mol_type = other DNA
tttttcaaaaagtataagattttttaaaagctctaagcatttgctccaaa

SEQ ID NO: 66634 - DNA, 50 bp, synthetic construct
  source 1..50: mol_type = other DNA
gaattaaaggtgacaatctcatcaattgatgaaattaaagtcattaaccg

SEQ ID NO: 66635 - DNA, 50 bp, synthetic construct
  source 1..50: mol_type = other DNA
cactggagccccagcaacatcaaaagcaaaaaaatccatgaaggccgctt

SEQ ID NO: 66636 - DNA, 50 bp, synthetic construct
  source 1..50: mol_type = other DNA
gggcgtttctgtttgggcattttctcgaaagcgcaaaaacaccgttctat

SEQ ID NO: 66637 - DNA, 50 bp, synthetic construct
  source 1..50: mol_type = other DNA
acatcccatacggatacacgatgcgagtatctctcgccccacttggatgg

SEQ ID NO: 66638 - DNA, 50 bp, synthetic construct
  source 1..50: mol_type = other DNA
ttatttcatcgtggatgttctcttgaacgagtacggcgacgtcgacgaca

SEQ ID NO: 66639 - DNA, 50 bp, synthetic construct
  source 1..50: mol_type = other DNA
cattcatcgggaaacgagccagtccacaggaaaggagcccaacatgaata

SEQ ID NO: 66640 - DNA, 50 bp, synthetic construct
  source 1..50: mol_type = other DNA
tttaccagacttgaaagcctgtcagcgggcaaaatggcaagagccgcaaa

SEQ ID NO: 66641 - DNA, 50 bp, synthetic construct
  source 1..50: mol_type = other DNA
ttagttagattttttacttttgttataaatgaagtatcaagattatctag

SEQ ID NO: 66642 - DNA, 50 bp, synthetic construct
  source 1..50: mol_type = other DNA
ctttacaatcgaaaatagatattttatcatttttcaacgataattgaaag

SEQ ID NO: 66643 - DNA, 50 bp, synthetic construct
  source 1..50: mol_type = other DNA
tcttaacttgatttttaatcggtgtttagtaaaataaacgtaatttgaca

SEQ ID NO: 66644 - DNA, 50 bp, synthetic construct
  source 1..50: mol_type = other DNA
cagatgtttatcgatgtgacggataacaccggagcagcacagcaggtgtg

SEQ ID NO: 66645 - DNA, 50 bp, synthetic construct
  source 1..50: mol_type = other DNA
taaagacggatttaattttatctgcggagcgaaaattacgcgcacctacg

SEQ ID NO: 66646 - DNA, 50 bp, synthetic construct
  source 1..50: mol_type = other DNA
tatttacagagcggaggtcgcacaattatccgaaatatgctataattgca

SEQ ID NO: 66647 - DNA, 50 bp, synthetic construct
  source 1..50: mol_type = other DNA
ttcgagataggcgatagaggtatgtttccgcctctgccggctgtggaatg

SEQ ID NO: 66648 - DNA, 50 bp, synthetic construct
  source 1..50: mol_type = other DNA
gtttttcagccggacctgtatacctttgaaatacaggccatccataaatc

SEQ ID NO: 66649 - DNA, 50 bp, synthetic construct
  source 1..50: mol_type = other DNA
gaaacatcttttatatattcatagaaacacgagcataagcagcaactttc

SEQ ID NO: 66650 - DNA, 50 bp, synthetic construct
  source 1..50: mol_type = other DNA
gccccgccagcaatccgtcaggatgcagccgaacggaaagcggccaaagc

SEQ ID NO: 66651 - DNA, 50 bp, synthetic construct
  source 1..50: mol_type = other DNA
gaatattttaccaagcaatcccatttatggcttatgctatgaaagtacct

SEQ ID NO: 66652 - DNA, 50 bp, synthetic construct
  source 1..50: mol_type = other DNA
tataagaataattcttcattttaataaaaaaatttttgcaaattcaaaaa

SEQ ID NO: 66653 - DNA, 50 bp, synthetic construct
  source 1..50: mol_type = other DNA
aatttttttacgtttataatttccaaggagttcttatgctggaaaaaaat

SEQ ID NO: 66654 - DNA, 50 bp, synthetic construct
  source 1..50: mol_type = other DNA
gttggagatctacaccacccgtgatgttttcgttcaatttattcctccga

SEQ ID NO: 66655 - DNA, 50 bp, synthetic construct
  source 1..50: mol_type = other DNA
cgcctactgccgggtttcaagccgaaataccgaagtcctcgcagtatatc

SEQ ID NO: 66656 - DNA, 50 bp, synthetic construct
  source 1..50: mol_type = other DNA
ataaaaatcacagtataaatgcttcgattgacatactcttttatagctgt

SEQ ID NO: 66657 - DNA, 50 bp, synthetic construct
  source 1..50: mol_type = other DNA
aaagaatatgaataaatataaagaaatggttatatgtattggatttctaa

SEQ ID NO: 66658 - DNA, 50 bp, synthetic construct
  source 1..50: mol_type = other DNA
ctgagctatgcccccaagacaattaaagtcagctttctcctttataccat

SEQ ID NO: 66659 - DNA, 50 bp, synthetic construct
  source 1..50: mol_type = other DNA
agaagaaaaatagaaataattgatgtgaccgaccgtgctgctgttctgct

SEQ ID NO: 66660 - DNA, 50 bp, synthetic construct
  source 1..50: mol_type = other DNA
aaaaaggctcagaaccaataaaaaattgtcaataagaagtgagcgtttta

SEQ ID NO: 66661 - DNA, 50 bp, synthetic construct
  source 1..50: mol_type = other DNA
gatcgatatctcctgcggctgccagatggagctgtttgggcttcatgaaa

SEQ ID NO: 66662 - DNA, 50 bp, synthetic construct
  source 1..50: mol_type = other DNA
agagcattaaaatccatgaaaaattaattgacaatcagaactaaggctag

SEQ ID NO: 66663 - DNA, 50 bp, synthetic construct
  source 1..50: mol_type = other DNA
tgttttcattatatcacagaaagaattttttattcggtataaaaaagagt

SEQ ID NO: 66664 - DNA, 50 bp, synthetic construct
  source 1..50: mol_type = other DNA
ttatcttcgcacagccgcatatcggcaaatatgtcactacccgaagatag

SEQ ID NO: 66665 - DNA, 50 bp, synthetic construct
  source 1..50: mol_type = other DNA
ttattctctggttcgtaaggtttttgatatatagactacccaaagagaaa

SEQ ID NO: 66666 - DNA, 50 bp, synthetic construct
  source 1..50: mol_type = other DNA
ttaccataatatttctcccaagtgcatagttttaaaggatatgtgaaaga

SEQ ID NO: 66667 - DNA, 50 bp, synthetic construct
  source 1..50: mol_type = other DNA
aagtcgattacaatttgcctgattgcaattctgtcgagtgtaattccggc

SEQ ID NO: 66668 - DNA, 50 bp, synthetic construct
  source 1..50: mol_type = other DNA
agaaaaaagcgaacacagaaaatttccattttccgtatgttttttttcgg

SEQ ID NO: 66669 - DNA, 50 bp, synthetic construct
  source 1..50: mol_type = other DNA
aatcctcggaagggttactacccagatgggcttgctccactccggacgaa

SEQ ID NO: 66670 - DNA, 50 bp, synthetic construct
  source 1..50: mol_type = other DNA
gaaaagaatggttttaatattgagaaactcccattccaatcggatttttt

SEQ ID NO: 66671 - DNA, 50 bp, synthetic construct
  source 1..50: mol_type = other DNA
tttccactttcaccttagccaccgggtgtatgctggggtcaaattgaaat

SEQ ID NO: 66672 - DNA, 50 bp, synthetic construct
  source 1..50: mol_type = other DNA
ctcttgccgtattcgatgatgttggcgcatcacagcgtttcgggcaaggt

SEQ ID NO: 66673 - DNA, 50 bp, synthetic construct
  source 1..50: mol_type = other DNA
ctacagctaaagtgataagcccccgattcagcttcatgctctcgatgtcc

SEQ ID NO: 66674 - DNA, 50 bp, synthetic construct
  source 1..50: mol_type = other DNA
aaaaaaggcaaaagtgttgacatattttttataacttttattatcttttt

SEQ ID NO: 66675 - DNA, 50 bp, synthetic construct
  source 1..50: mol_type = other DNA
ccagcttcttctgaatcttgtcgatattctgctgatataattgaatttgt

SEQ ID NO: 66676 - DNA, 50 bp, synthetic construct
  source 1..50: mol_type = other DNA
cagctttgaggcacaggtcgagtattatatggaactctatacggagaaat

SEQ ID NO: 66677 - DNA, 50 bp, synthetic construct
  source 1..50: mol_type = other DNA
tttcaggtcatcgaccgcacgggcatattcagagaaaggatgataagaat

SEQ ID NO: 66678 - DNA, 50 bp, synthetic construct
  source 1..50: mol_type = other DNA
cgaagagccgtcctgataagatctcttcttcccatcatctgcctccttat

SEQ ID NO: 66679 - DNA, 50 bp, synthetic construct
  source 1..50: mol_type = other DNA
tcgtgattttcgccagcagattttgcaggaaaagctggcgaaaaataaaa

SEQ ID NO: 66680 - DNA, 50 bp, synthetic construct
  source 1..50: mol_type = other DNA
gcatatagtgctgctcttaacatataaatattttacgcagcacgggcggc

SEQ ID NO: 66681 - DNA, 50 bp, synthetic construct
  source 1..50: mol_type = other DNA
ctatatgccaatcaaaaataagtaactctatatgtttgattatcaggata

SEQ ID NO: 66682 - DNA, 50 bp, synthetic construct
  source 1..50: mol_type = other DNA
accattagtgcacctctagtacacctgtgcttcaaaactgtggagctggt

SEQ ID NO: 66683 - DNA, 50 bp, synthetic construct
  source 1..50: mol_type = other DNA
ccatcgcgctccttcctgcgttttgcatcactgcgctcggaccgtgattg

SEQ ID NO: 66684 - DNA, 50 bp, synthetic construct
  source 1..50: mol_type = other DNA
cacaaagctgggcaaaaatgaaaatgtttctcgtctgaggaatcttagtg

SEQ ID NO: 66685 - DNA, 50 bp, synthetic construct
  source 1..50: mol_type = other DNA
catcccgcgactcatagaagtgggaccccggaaaggtgtgtcagcggatt

SEQ ID NO: 66686 - DNA, 50 bp, synthetic construct
  source 1..50: mol_type = other DNA
ctttctacgccctaacccaagatctttttctatggatatacggtataata

SEQ ID NO: 66687 - DNA, 50 bp, synthetic construct
  source 1..50: mol_type = other DNA
tttttttacaatcggcttgacatttaaaacacaagacggctatgaaaaat

SEQ ID NO: 66688 - DNA, 50 bp, synthetic construct
  source 1..50: mol_type = other DNA
ttcgagtatagggtgttcaattcccgggcatcaccgttccgggcctcatc

SEQ ID NO: 66689 - DNA, 50 bp, synthetic construct
  source 1..50: mol_type = other DNA
attgtatcgttcttattcaaaaatattttacccataaaaaacgagggtat

SEQ ID NO: 66690 - DNA, 50 bp, synthetic construct
  source 1..50: mol_type = other DNA
aatcaaactttgacacttaacgacctttcgtttccgagtgaaggtcgaat

SEQ ID NO: 66691 - DNA, 50 bp, synthetic construct
  source 1..50: mol_type = other DNA
atattattgtgtttacataaattttaaatttaaaataattactacgattt

SEQ ID NO: 66692 - DNA, 50 bp, synthetic construct
  source 1..50: mol_type = other DNA
gccttcatattctgttggttttaaatttcgactttgcagaagtaaaagga

SEQ ID NO: 66693 - DNA, 50 bp, synthetic construct
  source 1..50: mol_type = other DNA
ctacacgaagatatcctgtatttttcttaatacaaaatcacttactttaa

SEQ ID NO: 66694 - DNA, 50 bp, synthetic construct
  source 1..50: mol_type = other DNA
accgtagatgctttttcgataaaaaattttataaaatgatatgtaacggg

SEQ ID NO: 66695 - DNA, 50 bp, synthetic construct
  source 1..50: mol_type = other DNA
taacgcttcttgccattcttatcatcaaagaagaatatgcagaaccgtcc

SEQ ID NO: 66696 - DNA, 50 bp, synthetic construct
  source 1..50: mol_type = other DNA
tctttcatttccggcgtccagctttcacgctcgacaaggtgaattacagc

SEQ ID NO: 66697 - DNA, 50 bp, synthetic construct
  source 1..50: mol_type = other DNA
accaccggcctgcaggacggtatcagcggcgtgtcagttaggtgggtcat

SEQ ID NO: 66698 - DNA, 50 bp, synthetic construct
  source 1..50: mol_type = other DNA
aaactttcatcattttgttttcgctgccaaaaacaacttgacaattgtga

SEQ ID NO: 66699 - DNA, 50 bp, synthetic construct
  source 1..50: mol_type = other DNA
aaggaaatctgaacatgtccgattttgatgggaaatgttatgattattcc

SEQ ID NO: 66700 - DNA, 50 bp, synthetic construct
  source 1..50: mol_type = other DNA
tttatttcatataaaacggggaaatattacggttatttatttgctgagtt

SEQ ID NO: 66701 - DNA, 50 bp, synthetic construct
  source 1..50: mol_type = other DNA
gagtcattaaagcataagctggccgagcccacttttatgtttatggacga

SEQ ID NO: 66702 - DNA, 50 bp, synthetic construct
  source 1..50: mol_type = other DNA
atttcattataaatttttatgtctttagagaaaagaattgtaaatagaat

SEQ ID NO: 66703 - DNA, 50 bp, synthetic construct
  source 1..50: mol_type = other DNA
ttctttacgtgcgtaaggagacaattctgttgaaacacgggcataagctg

SEQ ID NO: 66704 - DNA, 50 bp, synthetic construct
  source 1..50: mol_type = other DNA
cacctcacgattatcttcttcaaaattcacaagcgctctcctttccgggt

SEQ ID NO: 66705 - DNA, 50 bp, synthetic construct
  source 1..50: mol_type = other DNA
tactcgtatcccgtttggcggtgcaagctattatgacgggcatacgatgc

SEQ ID NO: 66706 - DNA, 50 bp, synthetic construct
  source 1..50: mol_type = other DNA
cttttcccatacatcaaaagcggtgctatgctgatagtttaatacaaaat

SEQ ID NO: 66707 - DNA, 50 bp, synthetic construct
  source 1..50: mol_type = other DNA
tatatgcactaaaaatcgttgatataaggcaatgaatgttgttctatata

SEQ ID NO: 66708 - DNA, 50 bp, synthetic construct
  source 1..50: mol_type = other DNA
atgtgttctgggtcaatgccaaggagttttgaaaatttgtcgaaacacat

SEQ ID NO: 66709 - DNA, 50 bp, synthetic construct
  source 1..50: mol_type = other DNA
accagtgacaagtgcatagaattgataaatactattttctgtttctccaa

SEQ ID NO: 66710 - DNA, 50 bp, synthetic construct
  source 1..50: mol_type = other DNA
ttgttacatctccgacacccggattgaatacggtgatacggacggtgaaa

SEQ ID NO: 66711 - DNA, 50 bp, synthetic construct
  source 1..50: mol_type = other DNA
ctccttccgttttggtagtctatatacactgcttaccccgcatgaagcca

SEQ ID NO: 66712 - DNA, 50 bp, synthetic construct
  source 1..50: mol_type = other DNA
aacacatctgcttttttaatgtaatgtttcaccttttgagcatattcaag

SEQ ID NO: 66713 - DNA, 50 bp, synthetic construct
  source 1..50: mol_type = other DNA
acccgctgttttgcctgttgcgatgttggctgggtttgaaccctgcgtat

SEQ ID NO: 66714 - DNA, 50 bp, synthetic construct
  source 1..50: mol_type = other DNA
ataaaagtctcacttaatagtgaggccctaattagaacttagggtgtatt

SEQ ID NO: 66715 - DNA, 50 bp, synthetic construct
  source 1..50: mol_type = other DNA
catttcagtagaaactgagatgcagccttatcttttcggccactgaaata

SEQ ID NO: 66716 - DNA, 50 bp, synthetic construct
  source 1..50: mol_type = other DNA
aatcttgatcatgatgatgtcaatagatagaaatcattacaaggcagatt

SEQ ID NO: 66717 - DNA, 50 bp, synthetic construct
  source 1..50: mol_type = other DNA
tctgcctgcttgacgggattgtcataagccactcgatactaagaggcaga

SEQ ID NO: 66718 - DNA, 50 bp, synthetic construct
  source 1..50: mol_type = other DNA
agtgatcattatcgcagtccacaggatcgataactgcgataccgttttct

SEQ ID NO: 66719 - DNA, 50 bp, synthetic construct
  source 1..50: mol_type = other DNA
gggagtttttaggtatatggtgggttccctatatactttatcaaaatttc

SEQ ID NO: 66720 - DNA, 50 bp, synthetic construct
  source 1..50: mol_type = other DNA
ttcttatgaaactaataaaatattaatagattttaatagttccattattt

SEQ ID NO: 66721 - DNA, 50 bp, synthetic construct
  source 1..50: mol_type = other DNA
accattccttggatgatgggatcattcgagctcaacagtcaaggaggaat

SEQ ID NO: 66722 - DNA, 50 bp, synthetic construct
  source 1..50: mol_type = other DNA
gaaatatctccaaaatgaaagagtatttatgggcttttttgagattagta

SEQ ID NO: 66723 - DNA, 50 bp, synthetic construct
  source 1..50: mol_type = other DNA
attagatataaaattaaaaattctacaccattttctattttataaccaag

SEQ ID NO: 66724 - DNA, 50 bp, synthetic construct
  source 1..50: mol_type = other DNA
aaccgcaacatataaacctgctgaaaaccgtaggttgggggtttgagtcc

SEQ ID NO: 66725 - DNA, 50 bp, synthetic construct
  source 1..50: mol_type = other DNA
tctcatatctgttacatttaatattagtttctgataattgagatttgaga

SEQ ID NO: 66726 - DNA, 50 bp, synthetic construct
  source 1..50: mol_type = other DNA
taaaaataacacttcctttttgattaagggcggtaatattggagcttata

SEQ ID NO: 66727 - DNA, 50 bp, synthetic construct
  source 1..50: mol_type = other DNA
tatacactatttttgaaaaaaatgatctttttcttctaaaatcattaata

SEQ ID NO: 66728 - DNA, 50 bp, synthetic construct
  source 1..50: mol_type = other DNA
cgtaataccggcaacaaaagcaccgatatgctttgtcataatgatatacg

SEQ ID NO: 66729 - DNA, 50 bp, synthetic construct
  source 1..50: mol_type = other DNA
gtttgcctcataaaaatgaaaaagaagatattaattatgaaatagcaaaa

SEQ ID NO: 66730 - DNA, 50 bp, synthetic construct
  source 1..50: mol_type = other DNA
atgcggcctgcgccgtagggctgctccaaggtctggcaggcaggcggcga

SEQ ID NO: 66731 - DNA, 50 bp, synthetic construct
  source 1..50: mol_type = other DNA
ttacggggaagcatatgtagcagaagagtgatatatagactaccctaaac

SEQ ID NO: 66732 - DNA, 50 bp, synthetic construct
  source 1..50: mol_type = other DNA
tcctcaaggtcagagatagctggaattgcatataaaaatgaatatggcca

SEQ ID NO: 66733 - DNA, 50 bp, synthetic construct
  source 1..50: mol_type = other DNA
tttcaatattcaaataaccacccccatcggattaggttattgtattgact

SEQ ID NO: 66734 - DNA, 50 bp, synthetic construct
  source 1..50: mol_type = other DNA
atcgtatttcttttctataacgcctaaatattaggacaaacatatatgca

SEQ ID NO: 66735 - DNA, 50 bp, synthetic construct
  source 1..50: mol_type = other DNA
cagtcatatacatcactctaaaagcaactttctagtaattcttttgactt

SEQ ID NO: 66736 - DNA, 50 bp, synthetic construct
  source 1..50: mol_type = other DNA
aggatgccgggcttgggaaagtccggggcgagcaacgacacccacatcta

SEQ ID NO: 66737 - DNA, 50 bp, synthetic construct
  source 1..50: mol_type = other DNA
taatatagataattttatgtaaatatttttcatagcaactaactttgcag

SEQ ID NO: 66738 - DNA, 50 bp, synthetic construct
  source 1..50: mol_type = other DNA
gcgttatgagattagctaaaaaagaagtgatttcgtcttgaaaatcgcgc

SEQ ID NO: 66739 - DNA, 50 bp, synthetic construct
  source 1..50: mol_type = other DNA
tcatagcaacacctcgcattacattgccggaaaaatgtccgttgtaaagt

SEQ ID NO: 66740 - DNA, 50 bp, synthetic construct
  source 1..50: mol_type = other DNA
agaaaaatgaataaaaaatgaaaatatttttatgatttattctttaaatc

SEQ ID NO: 66741 - DNA, 50 bp, synthetic construct
  source 1..50: mol_type = other DNA
tctgactggtttattacttacaaatatctgtctgtgataaggcagctaag

SEQ ID NO: 66742 - DNA, 50 bp, synthetic construct
  source 1..50: mol_type = other DNA
gacaccacgctcggcccgttcgtcctatggaatatcccgaaaaaggagga

SEQ ID NO: 66743 - DNA, 50 bp, synthetic construct
  source 1..50: mol_type = other DNA
cagtcttctgctgtgttttcctgtgagatttaaaggacaatagaaagttc

SEQ ID NO: 66744 - DNA, 50 bp, synthetic construct
  source 1..50: mol_type = other DNA
tgcattcatgtgtaaatttcctcctataagggaaacactgcataaatccc

SEQ ID NO: 66745 - DNA, 50 bp, synthetic construct
  source 1..50: mol_type = other DNA
tctttccacactttcaacagtcaaaaatctggcagaaaaagcttgacaaa

SEQ ID NO: 66746 - DNA, 50 bp, synthetic construct
  source 1..50: mol_type = other DNA
tactggtctttctgctgatcctccttcccgcacgaacggaaagaagtgtc

SEQ ID NO: 66747 - DNA, 50 bp, synthetic construct
  source 1..50: mol_type = other DNA
tgaagaagctgcggcttagaatttggaggttttatgcctccggtttttct

SEQ ID NO: 66748 - DNA, 50 bp, synthetic construct
  source 1..50: mol_type = other DNA
tttgatttctaccacacaaccagttaaatgggaattgttaataaaacaaa

SEQ ID NO: 66749 - DNA, 50 bp, synthetic construct
  source 1..50: mol_type = other DNA
aacaatatctttaagcgacatctcttcagaaaatgaacaatgatgttgaa

SEQ ID NO: 66750 - DNA, 50 bp, synthetic construct
  source 1..50: mol_type = other DNA
ttaataacacttgaaaaatgaaggtttcttcaattttatttgttatttct

SEQ ID NO: 66751 - DNA, 50 bp, synthetic construct
  source 1..50: mol_type = other DNA
tgaataggtatctctgtctataccgatatatagacactaccggaaggagg

SEQ ID NO: 66752 - DNA, 50 bp, synthetic construct
  source 1..50: mol_type = other DNA
tcttcagatggatcatatgcttccatgaaggccgcttggacagacgagcg

SEQ ID NO: 66753 - DNA, 50 bp, synthetic construct
  source 1..50: mol_type = other DNA
agcaacgttaagctgcagctgatggacgtctgcgctcggagaaagttgta

SEQ ID NO: 66754 - DNA, 50 bp, synthetic construct
  source 1..50: mol_type = other DNA
ttcgcaagctgtaaatgatgtattgcaagtttattttatgcgctgctcaa

SEQ ID NO: 66755 - DNA, 50 bp, synthetic construct
  source 1..50: mol_type = other DNA
tactctttcctttgttataggtctttatacccattttctaagaaaggcgg

SEQ ID NO: 66756 - DNA, 50 bp, synthetic construct
  source 1..50: mol_type = other DNA
gcttttcaaatgctgtaagaacactcgccgatttacagccggtgagcagt

SEQ ID NO: 66757 - DNA, 50 bp, synthetic construct
  source 1..50: mol_type = other DNA
ttaattaaatagcaattcttccaccagacggtagattgctttttaattcc

SEQ ID NO: 66758 - DNA, 50 bp, synthetic construct
  source 1..50: mol_type = other DNA
ttattgctgctgacatagaaacattataccattgaaagccgcagaaatca

SEQ ID NO: 66759 - DNA, 50 bp, synthetic construct
  source 1..50: mol_type = other DNA
aaaaaagttgtacttttttcttgcaagcaagtcggaaaggagtttttgtg

SEQ ID NO: 66760 - DNA, 50 bp, synthetic construct
  source 1..50: mol_type = other DNA
aagctttctttttataatatttataagcaaatatttgagtcggaattgtt

SEQ ID NO: 66761 - DNA, 50 bp, synthetic construct
  source 1..50: mol_type = other DNA
tttttgccattttcgtatattcctttgtaaattcttgaaaatagaaaaaa

SEQ ID NO: 66762 - DNA, 50 bp, synthetic construct
  source 1..50: mol_type = other DNA
gataaaatcataactggttttgtaaaaacaaaaccaatagtggttgtatt

SEQ ID NO: 66763 - DNA, 50 bp, synthetic construct
  source 1..50: mol_type = other DNA
tatgcttgctcctctctaatgttttcgtcatttgccgaggacggctctga

SEQ ID NO: 66764 - DNA, 50 bp, synthetic construct
  source 1..50: mol_type = other DNA
tttttaccgtcaacactaaattggaagggatttacagtcgccggtataat

SEQ ID NO: 66765 - DNA, 50 bp, synthetic construct
  source 1..50: mol_type = other DNA
tctttccacactttcaacagtcaaaaacctggcagaaaaagcttgacaaa

SEQ ID NO: 66766 - DNA, 50 bp, synthetic construct
  source 1..50: mol_type = other DNA
aggggggataatatggcatcaaaatatatagatacggtattattgttatt

SEQ ID NO: 66767 - DNA, 50 bp, synthetic construct
  source 1..50: mol_type = other DNA
attcttgatttctgaattgacacccttaatgcgtatcagaaattcacaag

SEQ ID NO: 66768 - DNA, 50 bp, synthetic construct
  source 1..50: mol_type = other DNA
ctctaccaattgagctatacccctatagcatatgagcccctttattaacc

SEQ ID NO: 66769 - DNA, 50 bp, synthetic construct
  source 1..50: mol_type = other DNA
ttttgaccacaatgccataaagaaagcgctgatcgaaatttttgtcaatg

SEQ ID NO: 66770 - DNA, 50 bp, synthetic construct
  source 1..50: mol_type = other DNA
gaataagtcgaaaaaatacagtgaaatagtgaggtttagagcgtaataaa

SEQ ID NO: 66771 - DNA, 50 bp, synthetic construct
  source 1..50: mol_type = other DNA
ttcttgattaccatgtcccaagactgaaatgggaggtgagttatcatgaa

SEQ ID NO: 66772 - DNA, 50 bp, synthetic construct
  source 1..50: mol_type = other DNA
gatggttgagagggttgtttttttataatcatacctgctcatcttttgct

SEQ ID NO: 66773 - DNA, 50 bp, synthetic construct
  source 1..50: mol_type = other DNA
ccaagagcaagtacacggcaacgccggtcgcttgggctatttgtgcttcg

SEQ ID NO: 66774 - DNA, 50 bp, synthetic construct
  source 1..50: mol_type = other DNA
tatccaattgttcacaaataactcgagcagccagcttgacttattcggtc

SEQ ID NO: 66775 - DNA, 50 bp, synthetic construct
  source 1..50: mol_type = other DNA
tagactgtttaacactcctaatgtagcttcaaaactgtggagctggtctt

SEQ ID NO: 66776 - DNA, 50 bp, synthetic construct
  source 1..50: mol_type = other DNA
atttttcttcttcgtcattctcaaatttgacgctgcggaattcgaaaaag

SEQ ID NO: 66777 - DNA, 50 bp, synthetic construct
  source 1..50: mol_type = other DNA
gggctcgaacccagacaagatgatccttcatcttgataagcacgagtata

SEQ ID NO: 66778 - DNA, 50 bp, synthetic construct
  source 1..50: mol_type = other DNA
tgcaaaaatcaaatcgcctattagaaataccgcccgatttcggctacatt

SEQ ID NO: 66779 - DNA, 50 bp, synthetic construct
  source 1..50: mol_type = other DNA
tcagggcattatcgcagctaatttcgtaattttcaaacaactcatcctca

SEQ ID NO: 66780 - DNA, 50 bp, synthetic construct
  source 1..50: mol_type = other DNA
tataaaaaatctggctaggtaacttaattggtagagccttatttttttta

SEQ ID NO: 66781 - DNA, 50 bp, synthetic construct
  source 1..50: mol_type = other DNA
tcttttttgatttctccccatcccctggctgctgccacagtccgaaagaa

SEQ ID NO: 66782 - DNA, 50 bp, synthetic construct
  source 1..50: mol_type = other DNA
tatctgaatctccaagctctgccactggcaagagtttccatttttttata

SEQ ID NO: 66783 - DNA, 50 bp, synthetic construct
  source 1..50: mol_type = other DNA
aatttgacggccccgcttccgaaaattgcatcttttactgccgccatgtt

SEQ ID NO: 66784 - DNA, 50 bp, synthetic construct
  source 1..50: mol_type = other DNA
acctcatcatcctgaaatccgaacagactcggattcatcggggatgaatt

SEQ ID NO: 66785 - DNA, 50 bp, synthetic construct
  source 1..50: mol_type = other DNA
tgggtatcaagataaagcatagtttcaagtaggtgttatttttgtaccca

SEQ ID NO: 66786 - DNA, 50 bp, synthetic construct
  source 1..50: mol_type = other DNA
cacggatcaggaagaccagctccacagccactaggatgtgctgatattac

SEQ ID NO: 66787 - DNA, 50 bp, synthetic construct
  source 1..50: mol_type = other DNA
gaagtccaaacagctccatctggctgaccagataacactgtttgacctga

SEQ ID NO: 66788 - DNA, 50 bp, synthetic construct
  source 1..50: mol_type = other DNA
gaagttgttaagttatatgagaaggaattcgcatgaaacttaggaaaata

SEQ ID NO: 66789 - DNA, 50 bp, synthetic construct
  source 1..50: mol_type = other DNA
tattcacattatgtgcatattataaatgagcgttacaatgcgggtgaggt

SEQ ID NO: 66790 - DNA, 50 bp, synthetic construct
  source 1..50: mol_type = other DNA
gaaaaaacggcatagccgattgttaccacaatcggttgcatatttttttg

SEQ ID NO: 66791 - DNA, 50 bp, synthetic construct
  source 1..50: mol_type = other DNA
cgatgggaaagtgattattgatgaggtgagcatgcattcggtgcggataa

SEQ ID NO: 66792 - DNA, 50 bp, synthetic construct
  source 1..50: mol_type = other DNA
ataacagtatacgatgacaggttcacgatgaaatattctgatccttttga

SEQ ID NO: 66793 - DNA, 50 bp, synthetic construct
  source 1..50: mol_type = other DNA
aatgctgctttcatatttgtttggtagcaggaaaattaggaaaagacagt

SEQ ID NO: 66794 - DNA, 50 bp, synthetic construct
  source 1..50: mol_type = other DNA
agattttatggatgatccggcaaatctatctttctgcatccataaaaaac

SEQ ID NO: 66795 - DNA, 50 bp, synthetic construct
  source 1..50: mol_type = other DNA
atggaaaaaataaagctcttatctactgtgcgaggctgatttactatatt

SEQ ID NO: 66796 - DNA, 50 bp, synthetic construct
  source 1..50: mol_type = other DNA
cgtcaagcgagcttatggaatgggatttctctctgatttctcgcttttgg

SEQ ID NO: 66797 - DNA, 50 bp, synthetic construct
  source 1..50: mol_type = other DNA
ttccggcgcttccagccggaatacttatttttttgcttacgaggaggact

SEQ ID NO: 66798 - DNA, 50 bp, synthetic construct
  source 1..50: mol_type = other DNA
ttttaggcatagtaaaaggctccttttaagctttttatttatctctgccg

SEQ ID NO: 66799 - DNA, 50 bp, synthetic construct
  source 1..50: mol_type = other DNA
tccgacagagaatactgcgttttcgccaaaaggcagaacagcaaggaaac

SEQ ID NO: 66800 - DNA, 50 bp, synthetic construct
  source 1..50: mol_type = other DNA
ttgcaaaaagcttctatcgtttcgatcagcatgatgcaagcgacaagtgt

SEQ ID NO: 66801 - DNA, 50 bp, synthetic construct
  source 1..50: mol_type = other DNA
ccttttcggcaagctcctttccgcctgcggaaaggaaaatgcttatgaat

SEQ ID NO: 66802 - DNA, 50 bp, synthetic construct
  source 1..50: mol_type = other DNA
agtgatgtcaaaaacatatctgcaacggcagaggcattgacaattatttc

SEQ ID NO: 66803 - DNA, 50 bp, synthetic construct
  source 1..50: mol_type = other DNA
cattccgagtgcttccagctctggcattcgatctggatgccctgtttccg

SEQ ID NO: 66804 - DNA, 50 bp, synthetic construct
  source 1..50: mol_type = other DNA
gaactgataaaaatttgttatactataggtgagagtttcatcatcaggtg

SEQ ID NO: 66805 - DNA, 50 bp, synthetic construct
  source 1..50: mol_type = other DNA
tgtgacatattacctctgaaagcactaacttcttgtggtataatgtagaa

SEQ ID NO: 66806 - DNA, 50 bp, synthetic construct
  source 1..50: mol_type = other DNA
tgtataatttatatataatgtcccatcgggcattttattcttaccataaa

SEQ ID NO: 66807 - DNA, 50 bp, synthetic construct
  source 1..50: mol_type = other DNA
atacactaccacatagtccttgatatatccttatctgtggctgaggctat

SEQ ID NO: 66808 - DNA, 50 bp, synthetic construct
  source 1..50: mol_type = other DNA
ccagcacggcagaaactgtgctttgcagatgccagtttttccatcaagcc

SEQ ID NO: 66809 - DNA, 50 bp, synthetic construct
  source 1..50: mol_type = other DNA
tttcgagctgcgcaaggctttgaatgatctcgcccatgcgcatgtgataa

SEQ ID NO: 66810 - DNA, 50 bp, synthetic construct
  source 1..50: mol_type = other DNA
ttgcgtcacgctgagccatagcatcatcataaatcatcaacgtgacgcat

SEQ ID NO: 66811 - DNA, 50 bp, synthetic construct
  source 1..50: mol_type = other DNA
ccttatcagccatctgctcgaccaatttgttttgcaggaattggatagtg

SEQ ID NO: 66812 - DNA, 50 bp, synthetic construct
  source 1..50: mol_type = other DNA
tggttcttcttcggaaagtatcagacgaaggacttgtggtaaaagaaatg

SEQ ID NO: 66813 - DNA, 50 bp, synthetic construct
  source 1..50: mol_type = other DNA
tacaatctttaaaaatcctattaaattaaatgccttttttcaagtgatta

SEQ ID NO: 66814 - DNA, 50 bp, synthetic construct
  source 1..50: mol_type = other DNA
gctccatcgcagcaaggatgcggccgtccgcatccttcctgaggttgcat

SEQ ID NO: 66815 - DNA, 50 bp, synthetic construct
  source 1..50: mol_type = other DNA
cacgccgttgtcccggatatactgacgaccgaatgcggacggcagaggct

SEQ ID NO: 66816 - DNA, 50 bp, synthetic construct
  source 1..50: mol_type = other DNA
cttatagatttacactattctcaaactttattaaattataaatacatatt

SEQ ID NO: 66817 - DNA, 50 bp, synthetic construct
  source 1..50: mol_type = other DNA
agatgcggacggtgacggagttgttacaaagcccccggtttttcgcaagg

SEQ ID NO: 66818 - DNA, 50 bp, synthetic construct
  source 1..50: mol_type = other DNA
gcttataaggatcattgcttttggcaccaaaaattaggtggcttattagt

SEQ ID NO: 66819 - DNA, 50 bp, synthetic construct
  source 1..50: mol_type = other DNA
ttcttgaaagaagaaagttcatcaattggagccgctgtatatttactgat

SEQ ID NO: 66820 - DNA, 50 bp, synthetic construct
  source 1..50: mol_type = other DNA
tagaattataccttatttttgtataattcatcaaaagaatttttattatc

SEQ ID NO: 66821 - DNA, 50 bp, synthetic construct
  source 1..50: mol_type = other DNA
ctttccgtcatttgttctgattcctcaatatctgcataaaataatttccg

SEQ ID NO: 66822 - DNA, 50 bp, synthetic construct
  source 1..50: mol_type = other DNA
atggctttggcaagctgagacggcgtttcttcgcagccgtaccgggcatc

SEQ ID NO: 66823 - DNA, 50 bp, synthetic construct
  source 1..50: mol_type = other DNA
gtgaaagaaccgcagtccaaacggaacccgcaggcgataaacctgcaggt

SEQ ID NO: 66824 - DNA, 50 bp, synthetic construct
  source 1..50: mol_type = other DNA
aagaaccgcagtccaaacggaattctgtgactgatcgtgctgcctttctg

SEQ ID NO: 66825 - DNA, 50 bp, synthetic construct
  source 1..50: mol_type = other DNA
tgtaaaaaagttctccgaacttgatttttagtagagcgatcgttttattg

SEQ ID NO: 66826 - DNA, 50 bp, synthetic construct
  source 1..50: mol_type = other DNA
cccggctttaaatcatcaagagaattttcggttatctacagaaagaaggt

SEQ ID NO: 66827 - DNA, 50 bp, synthetic construct
  source 1..50: mol_type = other DNA
tagagaggacggtgcgataaatggcgccgtctatcccactcattactcag

SEQ ID NO: 66828 - DNA, 50 bp, synthetic construct
  source 1..50: mol_type = other DNA
catgatctatatcaccggtgacaccctatcggagcttctggaaaaggctg

SEQ ID NO: 66829 - DNA, 50 bp, synthetic construct
  source 1..50: mol_type = other DNA
cgtttttcatagttaaaaacctcctaaaagatagtttgcagctaaaaagg

SEQ ID NO: 66830 - DNA, 50 bp, synthetic construct
  source 1..50: mol_type = other DNA
ccatatttccttcagtttcttccgtacagaatgtaatgaaggtaaacagg

SEQ ID NO: 66831 - DNA, 50 bp, synthetic construct
  source 1..50: mol_type = other DNA
gtgcttttttattaaatgtttatgtaaataaaattttattaagcaaaaaa

SEQ ID NO: 66832 - DNA, 50 bp, synthetic construct
  source 1..50: mol_type = other DNA
aaacaatacctgcaaaaacaagagttcatagtctttgaccgaaattgtaa

SEQ ID NO: 66833 - DNA, 50 bp, synthetic construct
  source 1..50: mol_type = other DNA
tccgtatgactatcataccacacgccggataggtcgggcggtcattcggg

SEQ ID NO: 66834 - DNA, 50 bp, synthetic construct
  source 1..50: mol_type = other DNA
cggcaaccgtaaatcctttgacacatctgagtttcagttttacatggcag

SEQ ID NO: 66835 - DNA, 50 bp, synthetic construct
  source 1..50: mol_type = other DNA
ataaaacgatcgctctactaaaaatcagttttacatggcagtcgttttta

SEQ ID NO: 66836 - DNA, 50 bp, synthetic construct
  source 1..50: mol_type = other DNA
taacacctacttgtcaaagcggtgtttattgcgtggacgtacctttatta

SEQ ID NO: 66837 - DNA, 50 bp, synthetic construct
  source 1..50: mol_type = other DNA
atgttgtaataggcgtcacacactcaagtgtgttatgcttatacaaacaa

SEQ ID NO: 66838 - DNA, 50 bp, synthetic construct
  source 1..50: mol_type = other DNA
tccgcaggcggcgcacaaggtcggatttcggcttcggcggcgcctgcacc

SEQ ID NO: 66839 - DNA, 50 bp, synthetic construct
  source 1..50: mol_type = other DNA
gttatggctcttatgtatagccccatcataaaataaaatggaggtataat

SEQ ID NO: 66840 - DNA, 50 bp, synthetic construct
  source 1..50: mol_type = other DNA
acttcctgaggaaggttgtcggtctgcaccgatggtgttcagcgcactgt

SEQ ID NO: 66841 - DNA, 50 bp, synthetic construct
  source 1..50: mol_type = other DNA
acgaaacaaaaaggggcaggatcgttgtatcatcttcggtcagctatcgc

SEQ ID NO: 66842 - DNA, 50 bp, synthetic construct
  source 1..50: mol_type = other DNA
ggctgtctgccgtggcgcttgctgtgagcgatgagccacaacaaatatcc

SEQ ID NO: 66843 - DNA, 50 bp, synthetic construct
  source 1..50: mol_type = other DNA
gacaggctttatcctctttttcagtggacggtcagagcagccagcttgac

SEQ ID NO: 66844 - DNA, 50 bp, synthetic construct
  source 1..50: mol_type = other DNA
aggcagaagttcaaaaggaactccccttatcttcttttcctgtaccgccc

SEQ ID NO: 66845 - DNA, 50 bp, synthetic construct
  source 1..50: mol_type = other DNA
agtccattccggatgacacagagttccgaatggtgtatgtcccatgtatt

SEQ ID NO: 66846 - DNA, 50 bp, synthetic construct
  source 1..50: mol_type = other DNA
aatacttgactttttctatttcttatatttcctctgaaaaatcaagtctt

SEQ ID NO: 66847 - DNA, 50 bp, synthetic construct
  source 1..50: mol_type = other DNA
cgttaccctgtgtagtcccttgtaaactgcaaggaatacacagacaaagg

SEQ ID NO: 66848 - DNA, 50 bp, synthetic construct
  source 1..50: mol_type = other DNA
atgacagaattaaaaaacatagtacgttctatccggtttgagaagttcgg

SEQ ID NO: 66849 - DNA, 50 bp, synthetic construct
  source 1..50: mol_type = other DNA
aaagcaactatcattgatagttgcttgccactattggggctatttgcttt

SEQ ID NO: 66850 - DNA, 50 bp, synthetic construct
  source 1..50: mol_type = other DNA
gctgcctctgccacttcatcttcatcagaacgggcagcttgacttatttg

SEQ ID NO: 66851 - DNA, 50 bp, synthetic construct
  source 1..50: mol_type = other DNA
atacggaatacttcggttcgcttccgttgatacacggcagtaggctgcaa

SEQ ID NO: 66852 - DNA, 50 bp, synthetic construct
  source 1..50: mol_type = other DNA
aaatagtaaaaaagagcaaaaaatttccgtttttgataccggtagtggct

SEQ ID NO: 66853 - DNA, 50 bp, synthetic construct
  source 1..50: mol_type = other DNA
cccaaatgaagggcgcatgggtaataatttttatgcgcctttccttttga

SEQ ID NO: 66854 - DNA, 50 bp, synthetic construct
  source 1..50: mol_type = other DNA
gctttgcgttcctcgctgtgctttggaaaaagcactgagttttacaaaaa

SEQ ID NO: 66855 - DNA, 50 bp, synthetic construct
  source 1..50: mol_type = other DNA
atcactctaaaaggctaatttatcaactataattctgaattagaagaact

SEQ ID NO: 66856 - DNA, 50 bp, synthetic construct
  source 1..50: mol_type = other DNA
taataactgaaaatgatttaaaaaataccacgaagtatttttagttatat

SEQ ID NO: 66857 - DNA, 50 bp, synthetic construct
  source 1..50: mol_type = other DNA
acgaaagaatataaaacacaacgaaaaaattgatttttttattgtatacg

SEQ ID NO: 66858 - DNA, 50 bp, synthetic construct
  source 1..50: mol_type = other DNA
tgattggttttaaaagtgtatcaaaattgacaattttttaaatccaacaa

SEQ ID NO: 66859 - DNA, 50 bp, synthetic construct
  source 1..50: mol_type = other DNA
ttatcatattcattcattttagattagtcttgattgcaataatattaaat

SEQ ID NO: 66860 - DNA, 50 bp, synthetic construct
  source 1..50: mol_type = other DNA
gtttatgagaatataaaaaaacttgcacatttatttatattataaggaga

SEQ ID NO: 66861 - DNA, 50 bp, synthetic construct
  source 1..50: mol_type = other DNA
atttctacataaaatacaaacagaaacgtgttcaacttttggaataaaag

SEQ ID NO: 66862 - DNA, 50 bp, synthetic construct
  source 1..50: mol_type = other DNA
tgtctactatctgtatatgcgacacatgtggcataaagacatagtagaca

SEQ ID NO: 66863 - DNA, 50 bp, synthetic construct
  source 1..50: mol_type = other DNA
gtatttttcgaaataagccagtgcatacaatgtcttattttatctatgct

SEQ ID NO: 66864 - DNA, 50 bp, synthetic construct
  source 1..50: mol_type = other DNA
aatattacattttcattctcataaaggagcgagtatgaaacagtcgagta

SEQ ID NO: 66865 - DNA, 50 bp, synthetic construct
  source 1..50: mol_type = other DNA
gaaagtggttttcccggatccggttccgtaaatccgcaagggtttatttt

SEQ ID NO: 66866 - DNA, 50 bp, synthetic construct
  source 1..50: mol_type = other DNA
caaaacggtggtcgatgactggaggcagccagaaattaacacaattatgt

SEQ ID NO: 66867 - DNA, 50 bp, synthetic construct
  source 1..50: mol_type = other DNA
atcataattatacctcacggaagtatacttccataaggtatattattatg

SEQ ID NO: 66868 - DNA, 50 bp, synthetic construct
  source 1..50: mol_type = other DNA
aaatatcttttttgatttctccccatggctgcataagaaaaatcatgatg

SEQ ID NO: 66869 - DNA, 50 bp, synthetic construct
  source 1..50: mol_type = other DNA
gaagagatatactaattttattatatatcataacgttatcggctctgcta

SEQ ID NO: 66870 - DNA, 50 bp, synthetic construct
  source 1..50: mol_type = other DNA
atcaccgcccacatcaatatggtaaattccagaaccagctggcagattat

SEQ ID NO: 66871 - DNA, 50 bp, synthetic construct
  source 1..50: mol_type = other DNA
attcccatttactaccggtttgacgataggaacggaaaagaaatggtaac

SEQ ID NO: 66872 - DNA, 50 bp, synthetic construct
  source 1..50: mol_type = other DNA
cttgcatgtgcaatcacatattcatatcacctgtttttttaccatctgca

SEQ ID NO: 66873 - DNA, 50 bp, synthetic construct
  source 1..50: mol_type = other DNA
ggatattcggggtactctacttcttcgctgatataatttgtgtaataatt

SEQ ID NO: 66874 - DNA, 50 bp, synthetic construct
  source 1..50: mol_type = other DNA
cactgctccagatgtaccggagtgggaaacatggcagaagtggagcttat

SEQ ID NO: 66875 - DNA, 50 bp, synthetic construct
  source 1..50: mol_type = other DNA
ttcttttttatataaaattacaaaattttgcctatttattattgtttgaa

SEQ ID NO: 66876 - DNA, 50 bp, synthetic construct
  source 1..50: mol_type = other DNA
tattttttatattattataaagagtgctctaacatattctttaacttttc

SEQ ID NO: 66877 - DNA, 50 bp, synthetic construct
  source 1..50: mol_type = other DNA
tggtttcctcttctttcttttctatatagcaaagaagcccagaaaatgca

SEQ ID NO: 66878 - DNA, 50 bp, synthetic construct
  source 1..50: mol_type = other DNA
taatatcatgcatatacaaatcctcctgtttttgtagatttattataata

SEQ ID NO: 66879 - DNA, 50 bp, synthetic construct
  source 1..50: mol_type = other DNA
tttttttggaggagttatagagcagtgtgatctcatgccccgcaaaaaat

SEQ ID NO: 66880 - DNA, 50 bp, synthetic construct
  source 1..50: mol_type = other DNA
aagtaaggaaatttgtcgtggattgaaatactgcccaacttttggtacat

SEQ ID NO: 66881 - DNA, 50 bp, synthetic construct
  source 1..50: mol_type = other DNA
taaagaaaattgagattgcactcaggagtcggcagacgcactttcatata

SEQ ID NO: 66882 - DNA, 50 bp, synthetic construct
  source 1..50: mol_type = other DNA
tgttttcgaggaaaaatcgtcttgtacaagacacttttattggttaatag

SEQ ID NO: 66883 - DNA, 50 bp, synthetic construct
  source 1..50: mol_type = other DNA
ttaaaaattatttttactttcataatactgaaagtaaaaatagttatgaa

SEQ ID NO: 66884 - DNA, 50 bp, synthetic construct
  source 1..50: mol_type = other DNA
ggaggattaatactttgggaattaatttagaagcatgtgagcaatcctta

SEQ ID NO: 66885 - DNA, 50 bp, synthetic construct
  source 1..50: mol_type = other DNA
aactgaaagaaatttagaaaagaagattcatatttaacaccttttcaaga

SEQ ID NO: 66886 - DNA, 50 bp, synthetic construct
  source 1..50: mol_type = other DNA
cataatgtctactatctgtatatgcggcactggcagggcgtgacaatatc

SEQ ID NO: 66887 - DNA, 50 bp, synthetic construct
  source 1..50: mol_type = other DNA
gtgataatgaagtctcaataagagatgctttaatgtggtttcattattta

SEQ ID NO: 66888 - DNA, 50 bp, synthetic construct
  source 1..50: mol_type = other DNA
tgatagacgaagctgctgcctctcagggcagaatacagcttagtcggtca

SEQ ID NO: 66889 - DNA, 50 bp, synthetic construct
  source 1..50: mol_type = other DNA
cccaatagatgcacgaaaccctctcgaccctgttttacagccctatttca

SEQ ID NO: 66890 - DNA, 50 bp, synthetic construct
  source 1..50: mol_type = other DNA
ttcttctttctcattgctgggccttaacccccacgagttacaaatgtgaa

SEQ ID NO: 66891 - DNA, 50 bp, synthetic construct
  source 1..50: mol_type = other DNA
aatatggaagatgagttctggatgtgattccagccaagggcttccacgta

SEQ ID NO: 66892 - DNA, 50 bp, synthetic construct
  source 1..50: mol_type = other DNA
cctttttgtagtagtaactgatagtattcatagttactactacaaatatt

SEQ ID NO: 66893 - DNA, 50 bp, synthetic construct
  source 1..50: mol_type = other DNA
ttcttttttgccattatccatcaccgctttgccggaacggaaaaggagaa

SEQ ID NO: 66894 - DNA, 50 bp, synthetic construct
  source 1..50: mol_type = other DNA
aagaaaattccattttgttgcgatataagtccacaagggcttatttttta

SEQ ID NO: 66895 - DNA, 50 bp, synthetic construct
  source 1..50: mol_type = other DNA
tgggtagtctatatatcactctgaaatcagacgcagcagtcatctgtcga

SEQ ID NO: 66896 - DNA, 50 bp, synthetic construct
  source 1..50: mol_type = other DNA
aatctttcacctcctgcgccagcatgagcttgcgccggagggctatactt

SEQ ID NO: 66897 - DNA, 50 bp, synthetic construct
  source 1..50: mol_type = other DNA
ttacacactccattattccatatattattataactttattaattggatat

SEQ ID NO: 66898 - DNA, 50 bp, synthetic construct
  source 1..50: mol_type = other DNA
cttattctttatctgatagtaagacagtttatgccaaggataaaaaggtg

SEQ ID NO: 66899 - DNA, 50 bp, synthetic construct
  source 1..50: mol_type = other DNA
aaagaaagccgattgcatttcctggccttaacggacaatttggtttctga

SEQ ID NO: 66900 - DNA, 50 bp, synthetic construct
  source 1..50: mol_type = other DNA
cctctcgacctcgctgaagaaggacgtccttggccatcgaacccttgagg

SEQ ID NO: 66901 - DNA, 50 bp, synthetic construct
  source 1..50: mol_type = other DNA
aaactttttaatccaaattcaagctttcatatggaataattaaaaagtac

SEQ ID NO: 66902 - DNA, 50 bp, synthetic construct
  source 1..50: mol_type = other DNA
gagaatatataaaaagacaaccattgattcttgtatgattctatatttca

SEQ ID NO: 66903 - DNA, 50 bp, synthetic construct
  source 1..50: mol_type = other DNA
ggtgaaatagatggctcgctgtttgcaatcagcgataatgtggattctgc

SEQ ID NO: 66904 - DNA, 50 bp, synthetic construct
  source 1..50: mol_type = other DNA
gctgggcttccattcaagctcacggtgatgaggtagtaattgcgcttttt

SEQ ID NO: 66905 - DNA, 50 bp, synthetic construct
  source 1..50: mol_type = other DNA
aaatacgaagccttgtcctcaatgccgcttgctgccaataggaacggcag

SEQ ID NO: 66906 - DNA, 50 bp, synthetic construct
  source 1..50: mol_type = other DNA
tttcttgttagaagaccactttaattttatttgctgtttctatcaacaaa

SEQ ID NO: 66907 - DNA, 50 bp, synthetic construct
  source 1..50: mol_type = other DNA
tgattttaacggtattgcaggcgttggcagacgcaagggacttaaaatcc

SEQ ID NO: 66908 - DNA, 50 bp, synthetic construct
  source 1..50: mol_type = other DNA
aaaaaattactttctgaaacttttgggaaactttcctctctcaaatttta

SEQ ID NO: 66909 - DNA, 50 bp, synthetic construct
  source 1..50: mol_type = other DNA
ttttttcgcctcattgataaaatatccattttttgaataataaaatcctt

SEQ ID NO: 66910 - DNA, 50 bp, synthetic construct
  source 1..50: mol_type = other DNA
ggtataattctacgaatccctgaaaaatcgtggatatttcaaattattgt

SEQ ID NO: 66911 - DNA, 50 bp, synthetic construct
  source 1..50: mol_type = other DNA
agaggtcaattactatataataaggttctattttttattatttgtttttg

SEQ ID NO: 66912 - DNA, 50 bp, synthetic construct
  source 1..50: mol_type = other DNA
ctcgatgcgctcacccgcgccgttctcccggcaggcaagagccattgaag

SEQ ID NO: 66913 - DNA, 50 bp, synthetic construct
  source 1..50: mol_type = other DNA
cgttgtcttgaattcatagaaccggataattctattacttcgaattatga

SEQ ID NO: 66914 - DNA, 50 bp, synthetic construct
  source 1..50: mol_type = other DNA
ctgattagaccggatagcgggaaaattcatcaatacgacagtctaaagca

SEQ ID NO: 66915 - DNA, 50 bp, synthetic construct
  source 1..50: mol_type = other DNA
aacttttgcaaatactgttttatgggaagagtacagctatatgatgagcc

SEQ ID NO: 66916 - DNA, 50 bp, synthetic construct
  source 1..50: mol_type = other DNA
acgataaaaccgcacttcttttttctggaaaagcagttggattttcttgt

SEQ ID NO: 66917 - DNA, 50 bp, synthetic construct
  source 1..50: mol_type = other DNA
ctgattaatatagaacatcgtagtcgtttattttgctataccttaatttc

SEQ ID NO: 66918 - DNA, 50 bp, synthetic construct
  source 1..50: mol_type = other DNA
cagccctataaagtcaacggatttcataatatatatctcatacaggacaa

SEQ ID NO: 66919 - DNA, 50 bp, synthetic construct
  source 1..50: mol_type = other DNA
gcggtctggtggctgcggtcgccgaacagagacagcggcctgattcatca

SEQ ID NO: 66920 - DNA, 50 bp, synthetic construct
  source 1..50: mol_type = other DNA
actcaccgtatatcaagtcaatcccggacttgacggtttacccattgtca

SEQ ID NO: 66921 - DNA, 50 bp, synthetic construct
  source 1..50: mol_type = other DNA
ccaactgcctgtgctttgtggcgcagcccgggcagcatccaggcgctggg

SEQ ID NO: 66922 - DNA, 50 bp, synthetic construct
  source 1..50: mol_type = other DNA
atgaaaccaggtgtagaaatctacaattagatttctacttcaattcctga

SEQ ID NO: 66923 - DNA, 50 bp, synthetic construct
  source 1..50: mol_type = other DNA
ttacgaacaatcatagatttcttttatggtgtatgtgtcattattccacc

SEQ ID NO: 66924 - DNA, 50 bp, synthetic construct
  source 1..50: mol_type = other DNA
tgttgtactaatgtgacactacccgtgggctgtgttcaattagtacaata

SEQ ID NO: 66925 - DNA, 50 bp, synthetic construct
  source 1..50: mol_type = other DNA
gaaaagacggcagaacgatacctttgatttatttatgtaacctgtttttt

SEQ ID NO: 66926 - DNA, 50 bp, synthetic construct
  source 1..50: mol_type = other DNA
caagctgaactgctggaaatcggtcctgcgcttcatagctggtgagctgc

SEQ ID NO: 66927 - DNA, 50 bp, synthetic construct
  source 1..50: mol_type = other DNA
tcaatattatatacagatcggtacactgcctgatagcagaattcaatttc

SEQ ID NO: 66928 - DNA, 50 bp, synthetic construct
  source 1..50: mol_type = other DNA
ataggtaaatctttttttcgtcatttatgccgaaaacaacttgacaattg

SEQ ID NO: 66929 - DNA, 50 bp, synthetic construct
  source 1..50: mol_type = other DNA
acgatggtcgggagggatttcgttaaaacttcttccaaggtcatcattgt

SEQ ID NO: 66930 - DNA, 50 bp, synthetic construct
  source 1..50: mol_type = other DNA
gctgtttcatttcccgggtattcatgttgctgacagggagtgaaaaccat

SEQ ID NO: 66931 - DNA, 50 bp, synthetic construct
  source 1..50: mol_type = other DNA
ggaatggcagcaagtaaataggaaacgccgtaaagaatggtatgaattct

SEQ ID NO: 66932 - DNA, 50 bp, synthetic construct
  source 1..50: mol_type = other DNA
tacttgcaaaagcggtgtttagaatgttcttgacactgctattggtagaa

SEQ ID NO: 66933 - DNA, 50 bp, synthetic construct
  source 1..50: mol_type = other DNA
catttcccgtcaagtttttttgtaaaaccataaaaacttatttttaggct

SEQ ID NO: 66934 - DNA, 50 bp, synthetic construct
  source 1..50: mol_type = other DNA
actccgcgtatcggtggcgttggtctcatgaagctaccaaagcgctagcc

SEQ ID NO: 66935 - DNA, 50 bp, synthetic construct
  source 1..50: mol_type = other DNA
gttcatcattgtatttttttcgtccggagcatgaacaagattaatatcct

SEQ ID NO: 66936 - DNA, 50 bp, synthetic construct
  source 1..50: mol_type = other DNA
agcgtggcgacaagagatattatacgtttcacaggtctggcaaacaccgc

SEQ ID NO: 66937 - DNA, 50 bp, synthetic construct
  source 1..50: mol_type = other DNA
ctttctttttgtgttcaatccgctgaatatgaccgaacacaaaaagaaaa

SEQ ID NO: 66938 - DNA, 50 bp, synthetic construct
  source 1..50: mol_type = other DNA
gcctaaaagccattgataacggggctgtatgctataggaggctttttgta

SEQ ID NO: 66939 - DNA, 50 bp, synthetic construct
  source 1..50: mol_type = other DNA
caccttatatgaccgagatacaatcacctgcggacgggaaattaaaggaa

SEQ ID NO: 66940 - DNA, 50 bp, synthetic construct
  source 1..50: mol_type = other DNA
cggggaatatgggctgcggcattgctcactgccgttatccaaattgccat

SEQ ID NO: 66941 - DNA, 50 bp, synthetic construct
  source 1..50: mol_type = other DNA
attattattaatttaatattacattaatgaaaaaaatagtaaaggatata

SEQ ID NO: 66942 - DNA, 50 bp, synthetic construct
  source 1..50: mol_type = other DNA
catgagaaaattaagacattaaagatcattgttatcctcattatcctcta

SEQ ID NO: 66943 - DNA, 50 bp, synthetic construct
  source 1..50: mol_type = other DNA
attaggctttttgtagtagcgtccaccaagactactataaaaagcctaat

SEQ ID NO: 66944 - DNA, 50 bp, synthetic construct
  source 1..50: mol_type = other DNA
ccgttgattttcccattgattttggtgatggataatggcaaaaaagaaga

SEQ ID NO: 66945 - DNA, 50 bp, synthetic construct
  source 1..50: mol_type = other DNA
gtgtcgaagatcgggccggtcattgccatgaccgctgtgatttacgcccg

SEQ ID NO: 66946 - DNA, 50 bp, synthetic construct
  source 1..50: mol_type = other DNA
tactcgtttaacatctttacgcatatatgcgtaaaatcttaaaaattatc

SEQ ID NO: 66947 - DNA, 50 bp, synthetic construct
  source 1..50: mol_type = other DNA
ctctcaagtaatcttattttctgaatactttaataaagattaaaatattg

SEQ ID NO: 66948 - DNA, 50 bp, synthetic construct
  source 1..50: mol_type = other DNA
gtatttttgattttcacaccattgataatatcagtgaaaggggcgatacc

SEQ ID NO: 66949 - DNA, 50 bp, synthetic construct
  source 1..50: mol_type = other DNA
ttatctcaggcagaagaaagtcctcgcctcctgaatatattttatcataa

SEQ ID NO: 66950 - DNA, 50 bp, synthetic construct
  source 1..50: mol_type = other DNA
aacttatgatttgacaagagcttttggatcatcttgtctgggttcgagcc

SEQ ID NO: 66951 - DNA, 50 bp, synthetic construct
  source 1..50: mol_type = other DNA
tatcatttacaccgtccgggaagtgcactaaaataatggtacagttgatg

SEQ ID NO: 66952 - DNA, 50 bp, synthetic construct
  source 1..50: mol_type = other DNA
taaaatctgtcatatcttttttatattcgaagatgatatggttgatggac

SEQ ID NO: 66953 - DNA, 50 bp, synthetic construct
  source 1..50: mol_type = other DNA
tttttccgataccgtttgttttctatcatcatgaagccttaccggcggca

SEQ ID NO: 66954 - DNA, 50 bp, synthetic construct
  source 1..50: mol_type = other DNA
tttcctcctgttataccgctatcgctcgcgcggtgtggaattagaggaat

SEQ ID NO: 66955 - DNA, 50 bp, synthetic construct
  source 1..50: mol_type = other DNA
tgtggatgacaatgatcaagtgcatcgttaccagatcaagatcgagttca

SEQ ID NO: 66956 - DNA, 50 bp, synthetic construct
  source 1..50: mol_type = other DNA
taattattatcaatgtaaaattccaaggatttttacatatcggtccgatg

SEQ ID NO: 66957 - DNA, 50 bp, synthetic construct
  source 1..50: mol_type = other DNA
tatgctttagtaatgtcactttctgaaggtcctgaacgacccgaagtggc

SEQ ID NO: 66958 - DNA, 50 bp, synthetic construct
  source 1..50: mol_type = other DNA
ttgcgaacacgacaagctcgaacgtgtgagcacacgagaggcacagcgta

SEQ ID NO: 66959 - DNA, 50 bp, synthetic construct
  source 1..50: mol_type = other DNA
gaaggtcggaaaagtccgtctgttttctttgctctgcccttccttctttc

SEQ ID NO: 66960 - DNA, 50 bp, synthetic construct
  source 1..50: mol_type = other DNA
atctctgccgtgtatatggtggaaagtttctttgttggattgacagaaaa

SEQ ID NO: 66961 - DNA, 50 bp, synthetic construct
  source 1..50: mol_type = other DNA
aaaattgatgttagaggtgccgttaatgcggcaagttcattatctgttcc

SEQ ID NO: 66962 - DNA, 50 bp, synthetic construct
  source 1..50: mol_type = other DNA
tcgactcctccttgtaatttatttaaaaagaaataagacggaggataccg

SEQ ID NO: 66963 - DNA, 50 bp, synthetic construct
  source 1..50: mol_type = other DNA
ctttctcattgctgggccttatctttgctgttgactcactcacaaataag

SEQ ID NO: 66964 - DNA, 50 bp, synthetic construct
  source 1..50: mol_type = other DNA
cggcggctgcctttttgctcttgtccgcaaagcgggcaaggcagcccgca

SEQ ID NO: 66965 - DNA, 50 bp, synthetic construct
  source 1..50: mol_type = other DNA
tatggtcggcacgtcccgcgattcgtgaagtacgggacgtgcgcggcacg

SEQ ID NO: 66966 - DNA, 50 bp, synthetic construct
  source 1..50: mol_type = other DNA
acaaataaagaatttgttgaaaaagctttttatgataattcgttaaaagt

SEQ ID NO: 66967 - DNA, 50 bp, synthetic construct
  source 1..50: mol_type = other DNA
tagaattctcttcacctctcgggcttctgcgttcgctgagagccgttttt

SEQ ID NO: 66968 - DNA, 50 bp, synthetic construct
  source 1..50: mol_type = other DNA
tttttaacttcttccggcaatgattgattttttccagacgttctgtaaca

SEQ ID NO: 66969 - DNA, 50 bp, synthetic construct
  source 1..50: mol_type = other DNA
cgttatcaagaagatcatgagagcattaaaacagacgcttcttgaaatga

SEQ ID NO: 66970 - DNA, 50 bp, synthetic construct
  source 1..50: mol_type = other DNA
ttttatttgtctgtttcttttagttgctcaaaaaataattgcaactaatt

SEQ ID NO: 66971 - DNA, 50 bp, synthetic construct
  source 1..50: mol_type = other DNA
tagacgcaaaatgtttttactatccaagcaaaagtaccatatttattttt

SEQ ID NO: 66972 - DNA, 50 bp, synthetic construct
  source 1..50: mol_type = other DNA
gacggtgcggtgatggggagcaaccggaagtggggcatatttttggagtc

SEQ ID NO: 66973 - DNA, 50 bp, synthetic construct
  source 1..50: mol_type = other DNA
gaagcttgcatgaagatcttcgctacacagtccgtctgctgccgcccagg

SEQ ID NO: 66974 - DNA, 50 bp, synthetic construct
  source 1..50: mol_type = other DNA
tgttgtactaactataacgaacctacaggagcgtataagatagtacaaca

SEQ ID NO: 66975 - DNA, 50 bp, synthetic construct
  source 1..50: mol_type = other DNA
taagtaagatttctttgctcattgttacaatggcaagaaaaaagaaacag

SEQ ID NO: 66976 - DNA, 50 bp, synthetic construct
  source 1..50: mol_type = other DNA
acagcgttcatgtgcattctcctttcaatgatgcggcggcggaacgctgg

SEQ ID NO: 66977 - DNA, 50 bp, synthetic construct
  source 1..50: mol_type = other DNA
ccagaacttcaaagctgagtacctgcattgtatcaaagttggtgcccagt

SEQ ID NO: 66978 - DNA, 50 bp, synthetic construct
  source 1..50: mol_type = other DNA
catttcttgatgtcaaatattttaaagaaaataaggagcgaaaagaaatg

SEQ ID NO: 66979 - DNA, 50 bp, synthetic construct
  source 1..50: mol_type = other DNA
tattcactcaaaatatcaatcgctgatattcctgccttttagagtgatat

SEQ ID NO: 66980 - DNA, 50 bp, synthetic construct
  source 1..50: mol_type = other DNA
gaacaggtcatcgtggacggcgttgcaacaaacttaaaactacttgaaag

SEQ ID NO: 66981 - DNA, 50 bp, synthetic construct
  source 1..50: mol_type = other DNA
ttacacaaccaccaacagtaatgttcatatatctgttgcggattgtcaga

SEQ ID NO: 66982 - DNA, 50 bp, synthetic construct
  source 1..50: mol_type = other DNA
tcttacagcccgaggtcattcagcatgctggcctaccacaatgagtttgt

SEQ ID NO: 66983 - DNA, 50 bp, synthetic construct
  source 1..50: mol_type = other DNA
atctgtcataaaagaagttcattttgagatggcattgatttttagtagag

SEQ ID NO: 66984 - DNA, 50 bp, synthetic construct
  source 1..50: mol_type = other DNA
gacatattacctctaaaaccatcatatgataacaaaggtaatcttgtggt

SEQ ID NO: 66985 - DNA, 50 bp, synthetic construct
  source 1..50: mol_type = other DNA
caaatcaaaaaccgcagaaaaaaagctttttgcctggtgcgtttgggttg

SEQ ID NO: 66986 - DNA, 50 bp, synthetic construct
  source 1..50: mol_type = other DNA
ctgcccgttctgcggcatatcatcaggatgataaggataaaaacgggaaa

SEQ ID NO: 66987 - DNA, 50 bp, synthetic construct
  source 1..50: mol_type = other DNA
accattcctgccaccaagagcaagtacacggaggtgttggcaaaaaaggt

SEQ ID NO: 66988 - DNA, 50 bp, synthetic construct
  source 1..50: mol_type = other DNA
ggatgccttccggcagattgtctgcatcaccgttcttgaggacggcaacc

SEQ ID NO: 66989 - DNA, 50 bp, synthetic construct
  source 1..50: mol_type = other DNA
actcacggcctcttgaaccccattcaagcggtcgtcctgcttcttgttct

SEQ ID NO: 66990 - DNA, 50 bp, synthetic construct
  source 1..50: mol_type = other DNA
gcatttatggttttcatcgagcgggccctgagcctgaccggcatcgaagc

SEQ ID NO: 66991 - DNA, 50 bp, synthetic construct
  source 1..50: mol_type = other DNA
gtaaccaccataccggcatcactgactgatgacgaccgtatcctttttcg

SEQ ID NO: 66992 - DNA, 50 bp, synthetic construct
  source 1..50: mol_type = other DNA
ctcctcctgtttatgctgcagtttcatccatgcagggaaaatacacagag

SEQ ID NO: 66993 - DNA, 50 bp, synthetic construct
  source 1..50: mol_type = other DNA
agatggcggcaaaggtgaaagagcaagttcaaatgaagtctttcagtttg

SEQ ID NO: 66994 - DNA, 50 bp, synthetic construct
  source 1..50: mol_type = other DNA
cgtgccttttctttcatttccggcgtgccgtcccgcgccggaatggctgc

SEQ ID NO: 66995 - DNA, 50 bp, synthetic construct
  source 1..50: mol_type = other DNA
cagcatctggttcgccgctttctttttgtaaagcggcgtgtcagttaggt

SEQ ID NO: 66996 - DNA, 50 bp, synthetic construct
  source 1..50: mol_type = other DNA
tacggaaaaaatatgctcttgatgtcggtcgcttgcagagttccgccgtg

SEQ ID NO: 66997 - DNA, 50 bp, synthetic construct
  source 1..50: mol_type = other DNA
ttgggaggtgtaacattgtcattaaaaactggcaatgttttattgccaaa

SEQ ID NO: 66998 - DNA, 50 bp, synthetic construct
  source 1..50: mol_type = other DNA
ccgccctactctatcatatgccccgcctcgcccgcaagcagatagtccgt

SEQ ID NO: 66999 - DNA, 50 bp, synthetic construct
  source 1..50: mol_type = other DNA
tgccaacgatatccactttgacgagcagatcaaagttttcgtggtttcca

SEQ ID NO: 67000 - DNA, 50 bp, synthetic construct
  source 1..50: mol_type = other DNA
ttttggaaaaattgaagaaaaatcttgatttttctccgttttggttatag

SEQ ID NO: 67001 - DNA, 50 bp, synthetic construct
  source 1..50: mol_type = other DNA
tggcagcggcgcggacactgtgctgctgcaaagtgctgtctccgctgtgc

SEQ ID NO: 67002 - DNA, 50 bp, synthetic construct
  source 1..50: mol_type = other DNA
tttcgcgttattttggtaactggggaaaaagtttgaaaataaatcaaaaa

SEQ ID NO: 67003 - DNA, 50 bp, synthetic construct
  source 1..50: mol_type = other DNA
actgccgtgtttccacggatcaggaagcagatcagaaacaagctggcaaa

SEQ ID NO: 67004 - DNA, 50 bp, synthetic construct
  source 1..50: mol_type = other DNA
tggctgctctgaccgtccatatccatgttcctgaacgccaacagcaaaca

SEQ ID NO: 67005 - DNA, 50 bp, synthetic construct
  source 1..50: mol_type = other DNA
agccatacgaagtcctccttttttcgaaaaataagggttttcgtgggaaa

SEQ ID NO: 67006 - DNA, 50 bp, synthetic construct
  source 1..50: mol_type = other DNA
attctgctttgggataagcggtgaactcaccggaaatttcttcgccggtc

SEQ ID NO: 67007 - DNA, 50 bp, synthetic construct
  source 1..50: mol_type = other DNA
ttcagtccatccatcacattgagggtttgcaatgttcctctgtgcgggaa

SEQ ID NO: 67008 - DNA, 50 bp, synthetic construct
  source 1..50: mol_type = other DNA
ataaattgccttgcctttttggacgtgtcctgaaaggagggcgtatttat

SEQ ID NO: 67009 - DNA, 50 bp, synthetic construct
  source 1..50: mol_type = other DNA
ggctccttcctgccggatggatgcgctccggcaggccgcagaaaggaggc

SEQ ID NO: 67010 - DNA, 50 bp, synthetic construct
  source 1..50: mol_type = other DNA
tatttataaataccctctactttatattttgtcataggtcctacaaaata

SEQ ID NO: 67011 - DNA, 50 bp, synthetic construct
  source 1..50: mol_type = other DNA
gcggcgctgctgcctccccggttccggccgagcggaggtagcatcttgaa

SEQ ID NO: 67012 - DNA, 50 bp, synthetic construct
  source 1..50: mol_type = other DNA
tctccaaaaaggagagaggattttgcagaagattccgaacttttttgtat

SEQ ID NO: 67013 - DNA, 50 bp, synthetic construct
  source 1..50: mol_type = other DNA
catacgtcaggaagaacatccacatccgtggatttttggtcggacgttcc

SEQ ID NO: 67014 - DNA, 50 bp, synthetic construct
  source 1..50: mol_type = other DNA
attgttacgccggaaataccgtcgtcttttagagggaatatgtttacaaa

SEQ ID NO: 67015 - DNA, 50 bp, synthetic construct
  source 1..50: mol_type = other DNA
attgtttcggttgttccaattctgcagataatggcaaaaacagtaacggt

SEQ ID NO: 67016 - DNA, 50 bp, synthetic construct
  source 1..50: mol_type = other DNA
gtcaattttccgacttcaatataattttgtatgacactcggttttttatt

SEQ ID NO: 67017 - DNA, 50 bp, synthetic construct
  source 1..50: mol_type = other DNA
gccttcatattctgttggttttaaatttcgactttgcagaagtaaaaggg

SEQ ID NO: 67018 - DNA, 50 bp, synthetic construct
  source 1..50: mol_type = other DNA
acaaacaaacaatcacctccacgtgcacttggcgtcgattgggtgttggg

SEQ ID NO: 67019 - DNA, 50 bp, synthetic construct
  source 1..50: mol_type = other DNA
acaactatattatactatagaatgtgacgctcgtgacttaatttaaatag

SEQ ID NO: 67020 - DNA, 50 bp, synthetic construct
  source 1..50: mol_type = other DNA
gaatgagcagaacagcggcacggtcgcttttgccgccgaacagctttgcg

SEQ ID NO: 67021 - DNA, 50 bp, synthetic construct
  source 1..50: mol_type = other DNA
ccacggtgccgtcggatttgtggcgccgaacagctttgcgatcttcatgg

SEQ ID NO: 67022 - DNA, 50 bp, synthetic construct
  source 1..50: mol_type = other DNA
gctacgccgcagctaccagcggtgggtatcgccggtagcgtagatcatat

SEQ ID NO: 67023 - DNA, 50 bp, synthetic construct
  source 1..50: mol_type = other DNA
ataccacaacacctttgaaatagctattatatcatatcctgttccacctg

SEQ ID NO: 67024 - DNA, 50 bp, synthetic construct
  source 1..50: mol_type = other DNA
cctttaatttcccgtcatgccgtgataattacatgaagcagcaacaatgt

SEQ ID NO: 67025 - DNA, 50 bp, synthetic construct
  source 1..50: mol_type = other DNA
taaggatgccgatctgcctctgcgatccgaccaccgggagggcggaatta

SEQ ID NO: 67026 - DNA, 50 bp, synthetic construct
  source 1..50: mol_type = other DNA
accggcaataatggcggacaaaatagacgatgaggttcttttcctacgga

SEQ ID NO: 67027 - DNA, 50 bp, synthetic construct
  source 1..50: mol_type = other DNA
tgcgacaaaattgattactatatgtacacataataatcaatattgtcgca

SEQ ID NO: 67028 - DNA, 50 bp, synthetic construct
  source 1..50: mol_type = other DNA
gcaaaaggttatacggataccgctccggcgtttgccggattgcgcaggat

SEQ ID NO: 67029 - DNA, 50 bp, synthetic construct
  source 1..50: mol_type = other DNA
cgctttgacgccgccgcccagtccccccactgggcggcttctcaaaaacc

SEQ ID NO: 67030 - DNA, 50 bp, synthetic construct
  source 1..50: mol_type = other DNA
catcaatggcatcctgcatggtcagattgacctgttcgatgccatgtaaa

SEQ ID NO: 67031 - DNA, 50 bp, synthetic construct
  source 1..50: mol_type = other DNA
gtgttttcttggatacctttcacctttctgccagagttccggggaaacaa

SEQ ID NO: 67032 - DNA, 50 bp, synthetic construct
  source 1..50: mol_type = other DNA
tataccacagcacggctatggattccaagccaccctaatctttcattcag

SEQ ID NO: 67033 - DNA, 50 bp, synthetic construct
  source 1..50: mol_type = other DNA
acaatgtgcaggtgattccggcaacgtatctggaagctcatccactctgt

SEQ ID NO: 67034 - DNA, 50 bp, synthetic construct
  source 1..50: mol_type = other DNA
ggaattgaaggaaaacggcgacattaatgtcgcccgttccgttgcatctt

SEQ ID NO: 67035 - DNA, 50 bp, synthetic construct
  source 1..50: mol_type = other DNA
aaaagaaagccgattgattttttcggcacaaattcaatcgcattagagtt

SEQ ID NO: 67036 - DNA, 50 bp, synthetic construct
  source 1..50: mol_type = other DNA
accctgaaggaaattctgaaaaatgcaggcatcagctcaggcgtcatcat

SEQ ID NO: 67037 - DNA, 50 bp, synthetic construct
  source 1..50: mol_type = other DNA
gtaggcgaaggaaaacaggtctggcagaaaatgtgtgttcggctgtcgga

SEQ ID NO: 67038 - DNA, 50 bp, synthetic construct
  source 1..50: mol_type = other DNA
cacaatgtccgtgagccaatgcgccacccgcattgctttccttgcttcct

SEQ ID NO: 67039 - DNA, 50 bp, synthetic construct
  source 1..50: mol_type = other DNA
ttcaggacactgatgttataggaagctcacttttgcttaattctcctgtc

SEQ ID NO: 67040 - DNA, 50 bp, synthetic construct
  source 1..50: mol_type = other DNA
aggttatcagctatataacaccttagcataactgaaaattttgataatcc

SEQ ID NO: 67041 - DNA, 50 bp, synthetic construct
  source 1..50: mol_type = other DNA
gttgaggctgtaacgacagagcagatcaaaaaagatatttatattcagag

SEQ ID NO: 67042 - DNA, 50 bp, synthetic construct
  source 1..50: mol_type = other DNA
gaaatggatattgtttttttatgatctcatcgaaaaacaggtacttgatt

SEQ ID NO: 67043 - DNA, 50 bp, synthetic construct
  source 1..50: mol_type = other DNA
aacatacaacatcttttaagcctcgtgaggataaagagggactgatggta

SEQ ID NO: 67044 - DNA, 50 bp, synthetic construct
  source 1..50: mol_type = other DNA
gctttcctcattgctggcccttatctgttgacgtactcacaattagaagt

SEQ ID NO: 67045 - DNA, 50 bp, synthetic construct
  source 1..50: mol_type = other DNA
aatagcaagtacaatctgcgatacctcatatttatgatgtacttaaacgg

SEQ ID NO: 67046 - DNA, 50 bp, synthetic construct
  source 1..50: mol_type = other DNA
cggtacgatgaggtggtggctgccatatcgttgacttccagggcgtaaag

SEQ ID NO: 67047 - DNA, 50 bp, synthetic construct
  source 1..50: mol_type = other DNA
ccaggaccatcaagcacattgacatgattcactagctcagttggtagagc

SEQ ID NO: 67048 - DNA, 50 bp, synthetic construct
  source 1..50: mol_type = other DNA
ctgaaggaacaccggcccggcctttacagccttttagagtgatgtatggt

SEQ ID NO: 67049 - DNA, 50 bp, synthetic construct
  source 1..50: mol_type = other DNA
aggttgttgacgtctacgctacctgaaggtgttgctatcatgcacaagga

SEQ ID NO: 67050 - DNA, 50 bp, synthetic construct
  source 1..50: mol_type = other DNA
ttctaaagcctttttacaatggtgtcaatacagcaaaactgcctttgcta

SEQ ID NO: 67051 - DNA, 50 bp, synthetic construct
  source 1..50: mol_type = other DNA
ccgcaacatcggcctgcaagaggctatcctttgcggaagcgattttgtcg

SEQ ID NO: 67052 - DNA, 50 bp, synthetic construct
  source 1..50: mol_type = other DNA
tttgactgtaacattgcaacctccttaaagcttgccgatgtactttcaag

SEQ ID NO: 67053 - DNA, 50 bp, synthetic construct
  source 1..50: mol_type = other DNA
tcctgataattataaagtacttccggcgaagtaattaagcttcttcagga

SEQ ID NO: 67054 - DNA, 50 bp, synthetic construct
  source 1..50: mol_type = other DNA
cagggctatatcgatcaaattttatataagggattcagagctaatatgtg

SEQ ID NO: 67055 - DNA, 50 bp, synthetic construct
  source 1..50: mol_type = other DNA
gcaccgggtgtatatccaaacatgactaacacagcttttacagggagtgt

SEQ ID NO: 67056 - DNA, 50 bp, synthetic construct
  source 1..50: mol_type = other DNA
agctacgcactcgaaatcagcttaaattacgtgcttttacgctgattgaa

SEQ ID NO: 67057 - DNA, 50 bp, synthetic construct
  source 1..50: mol_type = other DNA
cacgattttgtcaaaattagactttttattctagtttagacaataaagcg

SEQ ID NO: 67058 - DNA, 50 bp, synthetic construct
  source 1..50: mol_type = other DNA
aagaatttagctgccaacccacgggccaatgtgtgggcgcataaaggcta

SEQ ID NO: 67059 - DNA, 50 bp, synthetic construct
  source 1..50: mol_type = other DNA
gcgcagatgccggagacagtggagcagaggacgatatccgggtgtagcgc

SEQ ID NO: 67060 - DNA, 50 bp, synthetic construct
  source 1..50: mol_type = other DNA
ggatggataagatcattgcccgccttgtgtagctatgaaattatacatcc

SEQ ID NO: 67061 - DNA, 50 bp, synthetic construct
  source 1..50: mol_type = other DNA
atgaatccgccctctctgcctgtaagcccgttcagaacggggcccatcct

SEQ ID NO: 67062 - DNA, 50 bp, synthetic construct
  source 1..50: mol_type = other DNA
ttttaatttgtagaactgtaataattctgcaacagcacctggaattgtag

SEQ ID NO: 67063 - DNA, 50 bp, synthetic construct
  source 1..50: mol_type = other DNA
ccgacgcgggcgctttgccgtttgcatgatctgcaggccctcctcgtcgg

SEQ ID NO: 67064 - DNA, 50 bp, synthetic construct
  source 1..50: mol_type = other DNA
gcgcattcatttgtggaagatataattatgccgaaaacaacttgacaatt

SEQ ID NO: 67065 - DNA, 50 bp, synthetic construct
  source 1..50: mol_type = other DNA
aacgcttcttgccattcttatcatcccttataagtatgccgtctccctga

SEQ ID NO: 67066 - DNA, 50 bp, synthetic construct
  source 1..50: mol_type = other DNA
atctgaatctccaaattctgccactcctttcagaattcttattctcataa

SEQ ID NO: 67067 - DNA, 50 bp, synthetic construct
  source 1..50: mol_type = other DNA
tggatatataatcgttgacggaaagggataggtcaacgactattttccag

SEQ ID NO: 67068 - DNA, 50 bp, synthetic construct
  source 1..50: mol_type = other DNA
ataacttccatattgtttcttttagcaaaaagaattacagcagtattaat

SEQ ID NO: 67069 - DNA, 50 bp, synthetic construct
  source 1..50: mol_type = other DNA
tgctgggacttctttattttgtactagtacaacactacccaaaaacaaca

SEQ ID NO: 67070 - DNA, 50 bp, synthetic construct
  source 1..50: mol_type = other DNA
ctgaaacggtcagttattttcagatgtcagagcgaatatgtccgtaccga

SEQ ID NO: 67071 - DNA, 50 bp, synthetic construct
  source 1..50: mol_type = other DNA
tatggattcggtaaaaaccatttttgaaaaaggtttctgacgatcccttt

SEQ ID NO: 67072 - DNA, 50 bp, synthetic construct
  source 1..50: mol_type = other DNA
taaacgaggcacaaggacgttctaatgagcttagccgtgaaactgcagac

SEQ ID NO: 67073 - DNA, 50 bp, synthetic construct
  source 1..50: mol_type = other DNA
aatgaaaaaagtcatcctgcaacacatatttcgcagtctgattttcaatt

SEQ ID NO: 67074 - DNA, 50 bp, synthetic construct
  source 1..50: mol_type = other DNA
cacaactagaaatttgttttctgaatgccaaaaacaacttgacaattgtg

SEQ ID NO: 67075 - DNA, 50 bp, synthetic construct
  source 1..50: mol_type = other DNA
tttggagttcctgttccgtttcgatgatgaaccagaaccggaagaagaaa

SEQ ID NO: 67076 - DNA, 50 bp, synthetic construct
  source 1..50: mol_type = other DNA
gctgtttttgccatctgatcgaccataatcgacctgggcttcaaaactgt

SEQ ID NO: 67077 - DNA, 50 bp, synthetic construct
  source 1..50: mol_type = other DNA
ggtacttgtatgtgccgcctttgctatcatttttggtatatgaaagtatg

SEQ ID NO: 67078 - DNA, 50 bp, synthetic construct
  source 1..50: mol_type = other DNA
tcatatcgcacttagccaacggtcggcaccgtggcggtcttggcatagat

SEQ ID NO: 67079 - DNA, 50 bp, synthetic construct
  source 1..50: mol_type = other DNA
cctgtcagcaacatacactaccacataatgtacctaagagtgctgacagg

SEQ ID NO: 67080 - DNA, 50 bp, synthetic construct
  source 1..50: mol_type = other DNA
ccgagatcaaagcataatcccatagatatggcaatcacggatatgtccga

SEQ ID NO: 67081 - DNA, 50 bp, synthetic construct
  source 1..50: mol_type = other DNA
atcgcatgaagctggttttctcctgcaaagaaaaagcagcttcttgggat

SEQ ID NO: 67082 - DNA, 50 bp, synthetic construct
  source 1..50: mol_type = other DNA
actgcgctacacccggatatctgcaagcggatgccctggcagggtcgcac

SEQ ID NO: 67083 - DNA, 50 bp, synthetic construct
  source 1..50: mol_type = other DNA
ggacacgtggattttcttccgtgctgacacgggcataacccgccgttttc

SEQ ID NO: 67084 - DNA, 50 bp, synthetic construct
  source 1..50: mol_type = other DNA
attttaaacaatatgtggtacatatttatgtcggtgtcaatttttataga

SEQ ID NO: 67085 - DNA, 50 bp, synthetic construct
  source 1..50: mol_type = other DNA
ctctcgctttctatgaggctgtacagagaaattattatagaagactccat

SEQ ID NO: 67086 - DNA, 50 bp, synthetic construct
  source 1..50: mol_type = other DNA
attagtgacttaatcccaattcaaacataaaggaggattgacaatggaat

SEQ ID NO: 67087 - DNA, 50 bp, synthetic construct
  source 1..50: mol_type = other DNA
cagccttcattatttatacctccaaatttttgtacaaaaaaattacactt

SEQ ID NO: 67088 - DNA, 50 bp, synthetic construct
  source 1..50: mol_type = other DNA
tttggggccggtgtgacacaaacttctgtgccgactatgacggccgtctg

SEQ ID NO: 67089 - DNA, 50 bp, synthetic construct
  source 1..50: mol_type = other DNA
acctcccatttacacatcattgaacggcaaaatctgtgtattgatggctt

SEQ ID NO: 67090 - DNA, 50 bp, synthetic construct
  source 1..50: mol_type = other DNA
aatttgggaaggaaatcttttgaggataacaaatatatgaaaaccgccgt

SEQ ID NO: 67091 - DNA, 50 bp, synthetic construct
  source 1..50: mol_type = other DNA
gtttcatcttcttcattcctttctttacgacggatatttgctccttacat

SEQ ID NO: 67092 - DNA, 50 bp, synthetic construct
  source 1..50: mol_type = other DNA
agtctgatgcggggcatctccggccattgtaccatgatcctgctcagcgc

SEQ ID NO: 67093 - DNA, 50 bp, synthetic construct
  source 1..50: mol_type = other DNA
gagatataatttttgtttaatttttaaaagcggaaagtgaaagatatctt

SEQ ID NO: 67094 - DNA, 50 bp, synthetic construct
  source 1..50: mol_type = other DNA
tacatttttactcattgtcatattcctgatgtaaaattaagaaatatgta

SEQ ID NO: 67095 - DNA, 50 bp, synthetic construct
  source 1..50: mol_type = other DNA
cagaaaatgtgctggcggcaatgagcccatctaatcatcaatcctttctg

SEQ ID NO: 67096 - DNA, 50 bp, synthetic construct
  source 1..50: mol_type = other DNA
gaggcatagaaaaagatatgactggccagtggattcttcatttccctagc

SEQ ID NO: 67097 - DNA, 50 bp, synthetic construct
  source 1..50: mol_type = other DNA
gaatgaactctgccatattttggctgtttaaaataaggcaatagcttatt

SEQ ID NO: 67098 - DNA, 50 bp, synthetic construct
  source 1..50: mol_type = other DNA
acagcctgcgccacaccaacgccagcttgcaatcagggcaaaactgtggt

SEQ ID NO: 67099 - DNA, 50 bp, synthetic construct
  source 1..50: mol_type = other DNA
cataggaaatcagctcatcatacaagataatcgtgaggtgatggttgatg

SEQ ID NO: 67100 - DNA, 50 bp, synthetic construct
  source 1..50: mol_type = other DNA
ggaccctcctacgaatcgacatggccccctttcgcatagaaggaggctat

SEQ ID NO: 67101 - DNA, 50 bp, synthetic construct
  source 1..50: mol_type = other DNA
ataggtatgttcgccagttaggataaattcttggaaacggtgtaaccctt

SEQ ID NO: 67102 - DNA, 50 bp, synthetic construct
  source 1..50: mol_type = other DNA
gcagctccggatccacagctccggcacctgagccttcgctcttatcatgc

SEQ ID NO: 67103 - DNA, 50 bp, synthetic construct
  source 1..50: mol_type = other DNA
atgagacagttctgtaagtccatcctgatttcaataagtctcttgttcat

SEQ ID NO: 67104 - DNA, 50 bp, synthetic construct
  source 1..50: mol_type = other DNA
aaatcctgcattttaagcagttttatattcatgatatatccccaagattt

SEQ ID NO: 67105 - DNA, 50 bp, synthetic construct
  source 1..50: mol_type = other DNA
taaaatttattcgtagagtttacagccttccagaccatgaatcagtttcg

SEQ ID NO: 67106 - DNA, 50 bp, synthetic construct
  source 1..50: mol_type = other DNA
gcaaatagcaagtcattcagggcatatttcaggcaatccagagtatttct

SEQ ID NO: 67107 - DNA, 50 bp, synthetic construct
  source 1..50: mol_type = other DNA
aaagactgtctggaagatcttcgtgtacgaatctaataatttacatattt

SEQ ID NO: 67108 - DNA, 50 bp, synthetic construct
  source 1..50: mol_type = other DNA
agaccattgacccgtaaaagatcaatacatccatttgtgatcaaaggcag

SEQ ID NO: 67109 - DNA, 50 bp, synthetic construct
  source 1..50: mol_type = other DNA
gctcttcggcctttctgtgcttcgaagacaccatcgaacttatgaacagc

SEQ ID NO: 67110 - DNA, 50 bp, synthetic construct
  source 1..50: mol_type = other DNA
cgatgttcgcgcagaaatcgtcatccgaagcgtgaagtaaaacaacattc

SEQ ID NO: 67111 - DNA, 50 bp, synthetic construct
  source 1..50: mol_type = other DNA
cttaaacggtggataatatttttaattaatgttttacttcacttttactt

SEQ ID NO: 67112 - DNA, 50 bp, synthetic construct
  source 1..50: mol_type = other DNA
atatcaagtcttttagtgagaaaagcaatcacaaataatatacttgataa

SEQ ID NO: 67113 - DNA, 50 bp, synthetic construct
  source 1..50: mol_type = other DNA
tattgtatggctaccagatcatacacgtatgagctatcagcgccgcatgg

SEQ ID NO: 67114 - DNA, 50 bp, synthetic construct
  source 1..50: mol_type = other DNA
ttccggcccgacatcttctacgagcaatcgtagaggaccaggcagagatc

SEQ ID NO: 67115 - DNA, 50 bp, synthetic construct
  source 1..50: mol_type = other DNA
ttggacaagctgtaactgcaagaagcttcaaatccgtatagcttgtccct

SEQ ID NO: 67116 - DNA, 50 bp, synthetic construct
  source 1..50: mol_type = other DNA
tcgagtaaacattaaactggaatacgtttttgttggaaatgataaaaagc

SEQ ID NO: 67117 - DNA, 50 bp, synthetic construct
  source 1..50: mol_type = other DNA
tcatcaaacataatctcatttgatttgaatcaagattttttgtttgaaaa

SEQ ID NO: 67118 - DNA, 50 bp, synthetic construct
  source 1..50: mol_type = other DNA
agtagaaagccttttgtttgctgcctttttcaatgaaaagggggtctata

SEQ ID NO: 67119 - DNA, 50 bp, synthetic construct
  source 1..50: mol_type = other DNA
cacgctcaaagctcacgccggaaaatattcgggagccaactttgttgagg

SEQ ID NO: 67120 - DNA, 50 bp, synthetic construct
  source 1..50: mol_type = other DNA
tctcctgaattagtttggattgaaatttcaatgaggaaaaataaaggagg

SEQ ID NO: 67121 - DNA, 50 bp, synthetic construct
  source 1..50: mol_type = other DNA
tcaaggcttttttttaaaaaatttcgctggactttcagaatcgattgtga

SEQ ID NO: 67122 - DNA, 50 bp, synthetic construct
  source 1..50: mol_type = other DNA
gggcgctttgccgtttgcagcagcagaccgaagcaaccggcagcccgccg

SEQ ID NO: 67123 - DNA, 50 bp, synthetic construct
  source 1..50: mol_type = other DNA
gtttcctcatcatcataaaaaaataatgaagattttgatgatgattattc

SEQ ID NO: 67124 - DNA, 50 bp, synthetic construct
  source 1..50: mol_type = other DNA
cagacgatcctgccgccgttttccatgggaaaacacccacgccgcccttt

SEQ ID NO: 67125 - DNA, 50 bp, synthetic construct
  source 1..50: mol_type = other DNA
agaggaacagctgaacagttttgaaaatgctttttcacagatgttcgaag

SEQ ID NO: 67126 - DNA, 50 bp, synthetic construct
  source 1..50: mol_type = other DNA
cacaattcctacatattataatatgttcgatataatataaacaggttcgc

SEQ ID NO: 67127 - DNA, 50 bp, synthetic construct
  source 1..50: mol_type = other DNA
gcaatgatgaagatgaaaaaagcccgggtgagttaaatcctcactcgttt

SEQ ID NO: 67128 - DNA, 50 bp, synthetic construct
  source 1..50: mol_type = other DNA
tgccctgacaccgccgtaattataattataattacaaaatgaggggagta

SEQ ID NO: 67129 - DNA, 50 bp, synthetic construct
  source 1..50: mol_type = other DNA
tcccatcttgaaatgataggctctatagttatcatcattgcaatattgct

SEQ ID NO: 67130 - DNA, 50 bp, synthetic construct
  source 1..50: mol_type = other DNA
tccttgacgatctcccatcccggttgactaccatccgattaaaccggggc

SEQ ID NO: 67131 - DNA, 50 bp, synthetic construct
  source 1..50: mol_type = other DNA
ccaagcggttcagcggcgaccgcccgtttggtcttggctctttgccttga

SEQ ID NO: 67132 - DNA, 50 bp, synthetic construct
  source 1..50: mol_type = other DNA
gatgttattgattaagttatttgacattcaagtccataaatgaaaagagt

SEQ ID NO: 67133 - DNA, 50 bp, synthetic construct
  source 1..50: mol_type = other DNA
ttgcggcggaggtaataaaaaacggcggggtggttagaccgccgattgga

SEQ ID NO: 67134 - DNA, 50 bp, synthetic construct
  source 1..50: mol_type = other DNA
ataatttttataatatccagcgaaattgcatatgctgttatgttaataat

SEQ ID NO: 67135 - DNA, 50 bp, synthetic construct
  source 1..50: mol_type = other DNA
atcggctcggaggctttttcgttagtaaatggaaaagcggtatagccgag

SEQ ID NO: 67136 - DNA, 50 bp, synthetic construct
  source 1..50: mol_type = other DNA
cccaccacggaacgggtgcgccgccggaggcgctcccgctcacgggcgag

SEQ ID NO: 67137 - DNA, 50 bp, synthetic construct
  source 1..50: mol_type = other DNA
tcatagcgttatctccttgcagaacaagctaacaggaggccgcgccatga

SEQ ID NO: 67138 - DNA, 50 bp, synthetic construct
  source 1..50: mol_type = other DNA
agggttatttttattattctgctttatgaaggaatacagaaaataaatac

SEQ ID NO: 67139 - DNA, 50 bp, synthetic construct
  source 1..50: mol_type = other DNA
aggagggacaggatgtaatcagcaagtgttgacataagcttccaaaaatg

SEQ ID NO: 67140 - DNA, 50 bp, synthetic construct
  source 1..50: mol_type = other DNA
agaagcagaaccggaagacagtctgaagataaactgttagccctgcttgc

SEQ ID NO: 67141 - DNA, 50 bp, synthetic construct
  source 1..50: mol_type = other DNA
gcaaaagtaagagtcagagcctatggagaggacggccgtcatagttttgt

SEQ ID NO: 67142 - DNA, 50 bp, synthetic construct
  source 1..50: mol_type = other DNA
ataagttcaccagttaagtctttctgcatagttttccgcagaaagtgggt

SEQ ID NO: 67143 - DNA, 50 bp, synthetic construct
  source 1..50: mol_type = other DNA
agaaaaaatcctcccaaaaatcaatcttcctctttgggggtattctaacc

SEQ ID NO: 67144 - DNA, 50 bp, synthetic construct
  source 1..50: mol_type = other DNA
ttttcttcataattcctccatcaaaaagaatgcagtggttggacagaaat

SEQ ID NO: 67145 - DNA, 50 bp, synthetic construct
  source 1..50: mol_type = other DNA
gaccatttgagaaatatggattctatgtgatgagcccacgggtagtgttc

SEQ ID NO: 67146 - DNA, 50 bp, synthetic construct
  source 1..50: mol_type = other DNA
aggttctccacataggtaaggctcgtgtacttgctcttggtggcaggaat

SEQ ID NO: 67147 - DNA, 50 bp, synthetic construct
  source 1..50: mol_type = other DNA
gtgatacaccagcgcggcatcgcccgtaacgaatagtcaaggtttttcat

SEQ ID NO: 67148 - DNA, 50 bp, synthetic construct
  source 1..50: mol_type = other DNA
cggaaaagcggtgattgatgaaactgggagtcataatttaagcttttcca

SEQ ID NO: 67149 - DNA, 50 bp, synthetic construct
  source 1..50: mol_type = other DNA
tactggtctttctgctgatcctccttcccgcacgaacagaaagaagtgtc

SEQ ID NO: 67150 - DNA, 50 bp, synthetic construct
  source 1..50: mol_type = other DNA
aatcattatgtcagacatacaggatcggctggatcgtcgacattgtgatg

SEQ ID NO: 67151 - DNA, 50 bp, synthetic construct
  source 1..50: mol_type = other DNA
gtcctgacttccttcatccgctgacgggagtattcaaagtcgcgcaggaa

SEQ ID NO: 67152 - DNA, 50 bp, synthetic construct
  source 1..50: mol_type = other DNA
gtatcaaattccgccattttggcgtatacactaattacgtaattttttaa

SEQ ID NO: 67153 - DNA, 50 bp, synthetic construct
  source 1..50: mol_type = other DNA
agcggcacatcgctgtaggtctcgatccggtaaccgaagggtgtgtgtcc

SEQ ID NO: 67154 - DNA, 50 bp, synthetic construct
  source 1..50: mol_type = other DNA
tatttaatcctgctattactttctgcatagccctttttactgatgccgaa

SEQ ID NO: 67155 - DNA, 50 bp, synthetic construct
  source 1..50: mol_type = other DNA
cagtatgcttgccatttcgcaaggaacctgaaaaaacacaatatttatag

SEQ ID NO: 67156 - DNA, 50 bp, synthetic construct
  source 1..50: mol_type = other DNA
tttgatactatttttaggcagtatgcacaatggctaaggttaccatcatc

SEQ ID NO: 67157 - DNA, 50 bp, synthetic construct
  source 1..50: mol_type = other DNA
aaatttaagaaaaaggtgttaaaaatttttaagtatattttcgtgaggtg

SEQ ID NO: 67158 - DNA, 50 bp, synthetic construct
  source 1..50: mol_type = other DNA
ctctgcctccctaccgaagcattggcgaatgatacccagagggcgcagca

SEQ ID NO: 67159 - DNA, 50 bp, synthetic construct
  source 1..50: mol_type = other DNA
tgttttcgtagcataagccataatataatataacatgagctacgatatag

SEQ ID NO: 67160 - DNA, 50 bp, synthetic construct
  source 1..50: mol_type = other DNA
acacggcagcctttcggatactcttttttgtaacaaaaaacaccccgccg

SEQ ID NO: 67161 - DNA, 50 bp, synthetic construct
  source 1..50: mol_type = other DNA
ttgttgggaccgtcctgctgaatattctgcctgaacctcatcgacaacag

SEQ ID NO: 67162 - DNA, 50 bp, synthetic construct
  source 1..50: mol_type = other DNA
ggaagaaaaggaaagtagcagggtacaacctgttgacgtagtttttcttt

SEQ ID NO: 67163 - DNA, 50 bp, synthetic construct
  source 1..50: mol_type = other DNA
agaatagagacgatccagttctgtattggttttaaagacgtctggatcac

SEQ ID NO: 67164 - DNA, 50 bp, synthetic construct
  source 1..50: mol_type = other DNA
cgggttgcaggagatatacacgatacgttgattatatctcggtttagagt

SEQ ID NO: 67165 - DNA, 50 bp, synthetic construct
  source 1..50: mol_type = other DNA
tttcctggataatggtgtttatagtgatatatagactaccaaaacggaag

SEQ ID NO: 67166 - DNA, 50 bp, synthetic construct
  source 1..50: mol_type = other DNA
aaattacgtcgttatggtactccaggagaattagcgtaaatcgaatgtgc

SEQ ID NO: 67167 - DNA, 50 bp, synthetic construct
  source 1..50: mol_type = other DNA
ccacaaaatttcagtgttaaacttaattgtccgaagctgaacaaaaggct

SEQ ID NO: 67168 - DNA, 50 bp, synthetic construct
  source 1..50: mol_type = other DNA
tctataatatatgttttgcacaaattttatcataaaaccgtgcttatgca

SEQ ID NO: 67169 - DNA, 50 bp, synthetic construct
  source 1..50: mol_type = other DNA
aggaggcggaaatggtataatatctgaattccataatattaccgtcacac

SEQ ID NO: 67170 - DNA, 50 bp, synthetic construct
  source 1..50: mol_type = other DNA
aaaatgtagactttctatgatgtgtttctttagtgctcccgacagtttta

SEQ ID NO: 67171 - DNA, 50 bp, synthetic construct
  source 1..50: mol_type = other DNA
cgccaccgcggcagacataactaattgtagtgtccatataagcctttgtg

SEQ ID NO: 67172 - DNA, 50 bp, synthetic construct
  source 1..50: mol_type = other DNA
gaagatgtaagaaagtgggagaggtaccttcgaatgcggttttacgcttc

SEQ ID NO: 67173 - DNA, 50 bp, synthetic construct
  source 1..50: mol_type = other DNA
ttctttcaggagattccatagaatgcgggcaatttaatctcctgatcgaa

SEQ ID NO: 67174 - DNA, 50 bp, synthetic construct
  source 1..50: mol_type = other DNA
gatataatccacgcttattaaaaaatttcacaatagtacgggaatatatc

SEQ ID NO: 67175 - DNA, 50 bp, synthetic construct
  source 1..50: mol_type = other DNA
gcagaaatgcagggtgttttctgttaaaggaaaaataccgttttttcagc

SEQ ID NO: 67176 - DNA, 50 bp, synthetic construct
  source 1..50: mol_type = other DNA
gggcctcggattcatcctcagcgaagcctcctgcggtaaatccgtggaag

SEQ ID NO: 67177 - DNA, 50 bp, synthetic construct
  source 1..50: mol_type = other DNA
tgcttgataacccgtctacagagggctttttataccggacttgtaaaagg

SEQ ID NO: 67178 - DNA, 50 bp, synthetic construct
  source 1..50: mol_type = other DNA
acaaactcattgtggtaggccagcatgctgaatgacctcgggctgtaaga

SEQ ID NO: 67179 - DNA, 50 bp, synthetic construct
  source 1..50: mol_type = other DNA
tttctcacccctcctttgtgccagcgctggcaagcgaggccccggtgatt

SEQ ID NO: 67180 - DNA, 50 bp, synthetic construct
  source 1..50: mol_type = other DNA
gccggtggcccgtggtaggccttgccgccggcgcaccacagcatttcggg

SEQ ID NO: 67181 - DNA, 50 bp, synthetic construct
  source 1..50: mol_type = other DNA
ctcgttatcgtctttgccatacctttttgtatgtggaatacccctcaaga

SEQ ID NO: 67182 - DNA, 50 bp, synthetic construct
  source 1..50: mol_type = other DNA
acaaaacggcaaccggcactgattttcaacttctccggttgccctgcatt

SEQ ID NO: 67183 - DNA, 50 bp, synthetic construct
  source 1..50: mol_type = other DNA
atagaaatacctactttctaataaattttatctgctttaaaagatctata

SEQ ID NO: 67184 - DNA, 50 bp, synthetic construct
  source 1..50: mol_type = other DNA
gtcgagcagtttgaagttctcaaggatttctcaagtatggtggctgcttg

SEQ ID NO: 67185 - DNA, 50 bp, synthetic construct
  source 1..50: mol_type = other DNA
gtttatccgtccttcttttatattgcaaaataagagaaggtaggaagcgt

SEQ ID NO: 67186 - DNA, 50 bp, synthetic construct
  source 1..50: mol_type = other DNA
tctagcataagctactaaatacatatatgtataaagaaggaaaatctatt

SEQ ID NO: 67187 - DNA, 50 bp, synthetic construct
  source 1..50: mol_type = other DNA
atgccaggtcaatgatccgtgtcggttgacacacggcagtaggctgccat

SEQ ID NO: 67188 - DNA, 50 bp, synthetic construct
  source 1..50: mol_type = other DNA
tttttgcgggtttcagaaacggcttttaattattcctcaagagcgcaaaa

SEQ ID NO: 67189 - DNA, 50 bp, synthetic construct
  source 1..50: mol_type = other DNA
aagggcggctccaaatggaaaagaatttcagcataacaaaagctgccctg

SEQ ID NO: 67190 - DNA, 50 bp, synthetic construct
  source 1..50: mol_type = other DNA
ttcgtcgttatggtactccagaagctcttcgagaacttcctcttgaagga

SEQ ID NO: 67191 - DNA, 50 bp, synthetic construct
  source 1..50: mol_type = other DNA
taatctcggctaaaaatggagagaattctccctgttttaacgagagaata

SEQ ID NO: 67192 - DNA, 50 bp, synthetic construct
  source 1..50: mol_type = other DNA
gcgacaaaattgattactttctgtatgaagattgtaattaatattggcct

SEQ ID NO: 67193 - DNA, 50 bp, synthetic construct
  source 1..50: mol_type = other DNA
tttccgggttcgccttttcacgggaagatttgtcaagagtaaatcggagg

SEQ ID NO: 67194 - DNA, 50 bp, synthetic construct
  source 1..50: mol_type = other DNA
tttctatgctcgaatcaagaattttaaaacgctctataatttccacaaaa

SEQ ID NO: 67195 - DNA, 50 bp, synthetic construct
  source 1..50: mol_type = other DNA
ttagttcctcttttttctgttctattccctgtggaaaaaatcatctctaa

SEQ ID NO: 67196 - DNA, 50 bp, synthetic construct
  source 1..50: mol_type = other DNA
aaaactggtggaacagattttcagggagaaaaatccgagtacaggattat

SEQ ID NO: 67197 - DNA, 50 bp, synthetic construct
  source 1..50: mol_type = other DNA
tttttcaatatcaggtatggatatagattggatacggagaggaataaaat

SEQ ID NO: 67198 - DNA, 50 bp, synthetic construct
  source 1..50: mol_type = other DNA
agtccaccattacaatctaatccgaacagaagggggaataataatgccgg

SEQ ID NO: 67199 - DNA, 50 bp, synthetic construct
  source 1..50: mol_type = other DNA
atctgcaagctgtttttgttgggagctcaaacagctaaacaaatgcaaga

SEQ ID NO: 67200 - DNA, 50 bp, synthetic construct
  source 1..50: mol_type = other DNA
tcctcggcttcctcctccaagacctgcgtcttcgtcgattaccgcgatac

SEQ ID NO: 67201 - DNA, 50 bp, synthetic construct
  source 1..50: mol_type = other DNA
tttcatttaaaaatcttccttttctaaataagggaaggtataaaattaaa

SEQ ID NO: 67202 - DNA, 50 bp, synthetic construct
  source 1..50: mol_type = other DNA
agaaaagaaaacatcagggaaaagatcagagatctgatcaaatctgcatt

SEQ ID NO: 67203 - DNA, 50 bp, synthetic construct
  source 1..50: mol_type = other DNA
gtccggcaggcggtaatccgggatgcacgccggacaccggcagcccggac

SEQ ID NO: 67204 - DNA, 50 bp, synthetic construct
  source 1..50: mol_type = other DNA
gaacttttgttctcttgcgcggctgccgcatttaacaattcattcagttc

SEQ ID NO: 67205 - DNA, 50 bp, synthetic construct
  source 1..50: mol_type = other DNA
tttacgatgaggttcgccacctgtccgcttcttgcgttttttctctgctt

SEQ ID NO: 67206 - DNA, 50 bp, synthetic construct
  source 1..50: mol_type = other DNA
gctggataatctcgtgaaattcaaatttcaacaagtcatagataaacagc

SEQ ID NO: 67207 - DNA, 50 bp, synthetic construct
  source 1..50: mol_type = other DNA
tacaaatatcgcaaaaagcgcgaattttccagctatttttaaggaggtta

SEQ ID NO: 67208 - DNA, 50 bp, synthetic construct
  source 1..50: mol_type = other DNA
ctgcctcactgtgcgtcctgttgcgctcatacgctcgccgcgtccggctc

SEQ ID NO: 67209 - DNA, 50 bp, synthetic construct
  source 1..50: mol_type = other DNA
ttcttcttttttcgattacttcatacaaagattaacagaaaaaagcgcct

SEQ ID NO: 67210 - DNA, 50 bp, synthetic construct
  source 1..50: mol_type = other DNA
gcggcagcagtgccaaagaagaaacggcgcttctttaattctgtgatcgg

SEQ ID NO: 67211 - DNA, 50 bp, synthetic construct
  source 1..50: mol_type = other DNA
aataaagatactcgaagaaaaaatgggctttttctatctgtataataatt

SEQ ID NO: 67212 - DNA, 50 bp, synthetic construct
  source 1..50: mol_type = other DNA
ggtcattcgtgaccgtatccttgatatatagactaccctgaaagaaagga

SEQ ID NO: 67213 - DNA, 50 bp, synthetic construct
  source 1..50: mol_type = other DNA
agcggttttgtttgcattccttagtttttcagaatgcagagttcggctct

SEQ ID NO: 67214 - DNA, 50 bp, synthetic construct
  source 1..50: mol_type = other DNA
agaaaacggcatcgcggtcatctgcgaggaacacgccggggctgcattct

SEQ ID NO: 67215 - DNA, 50 bp, synthetic construct
  source 1..50: mol_type = other DNA
ggtacagatgtaaacagagccatcacgatgttctccacgaacttcgggcc

SEQ ID NO: 67216 - DNA, 50 bp, synthetic construct
  source 1..50: mol_type = other DNA
ggtcttcaatgaaggtgtcgccgatgccctgaacacctttatcgaagatc

SEQ ID NO: 67217 - DNA, 50 bp, synthetic construct
  source 1..50: mol_type = other DNA
gtgatttcagcaggctccgccctgtggaggccggaacacgcttttgtgct

SEQ ID NO: 67218 - DNA, 50 bp, synthetic construct
  source 1..50: mol_type = other DNA
gtaagcgtcaatggtcttctgtgcgaacagagataacaaaaaacgcctcc

SEQ ID NO: 67219 - DNA, 50 bp, synthetic construct
  source 1..50: mol_type = other DNA
cctgacctgctttgttttcacgatgtatcgtggttacggatttggccatt

SEQ ID NO: 67220 - DNA, 50 bp, synthetic construct
  source 1..50: mol_type = other DNA
cgggcactgatgctggaatccggcaggacggatcaatatatgaaagaaag

SEQ ID NO: 67221 - DNA, 50 bp, synthetic construct
  source 1..50: mol_type = other DNA
attgcgctcgaaggattctttggaattgctgtcaatcggagaggctgaat

SEQ ID NO: 67222 - DNA, 50 bp, synthetic construct
  source 1..50: mol_type = other DNA
agctggaggaggcactgcgggagcggatgtcccttctggttcctcaacag

SEQ ID NO: 67223 - DNA, 50 bp, synthetic construct
  source 1..50: mol_type = other DNA
ataaatttcatgttttcctttccgggtgcctggggaaaggggctatttat

SEQ ID NO: 67224 - DNA, 50 bp, synthetic construct
  source 1..50: mol_type = other DNA
aaaatacgttccaatatttcatcggtgctaaaagttttttagctgaattt

SEQ ID NO: 67225 - DNA, 50 bp, synthetic construct
  source 1..50: mol_type = other DNA
tcattcagaccgaataagtcaagctggctgcttttatttatctctggaat

SEQ ID NO: 67226 - DNA, 50 bp, synthetic construct
  source 1..50: mol_type = other DNA
aagataaagataaaacattttttgatgaaactatgtggtagtgtatgttg

SEQ ID NO: 67227 - DNA, 50 bp, synthetic construct
  source 1..50: mol_type = other DNA
aggaatggcagcaaataaataggaaaacacacttatttattgcaggaatc

SEQ ID NO: 67228 - DNA, 50 bp, synthetic construct
  source 1..50: mol_type = other DNA
tttttctagtttaactttcttacatttgtaaggttgctctgtttataaat

SEQ ID NO: 67229 - DNA, 50 bp, synthetic construct
  source 1..50: mol_type = other DNA
ttgctgttggcaatcgtctgcgcaatgctctgaacggtttggcaaagaaa

SEQ ID NO: 67230 - DNA, 50 bp, synthetic construct
  source 1..50: mol_type = other DNA
gccttttgtgtccgattcggtcacaacatcataaaaatactatctcaata

SEQ ID NO: 67231 - DNA, 50 bp, synthetic construct
  source 1..50: mol_type = other DNA
cgcagtttgcggacagttcaatgctgccatgtaaacctccgcattctctt

SEQ ID NO: 67232 - DNA, 50 bp, synthetic construct
  source 1..50: mol_type = other DNA
tgatgtcaaaaacatatctgcaacgccaaacgccacggcaaggcgcactg

SEQ ID NO: 67233 - DNA, 50 bp, synthetic construct
  source 1..50: mol_type = other DNA
ttcattgcaagagttgcggataatatacgatctaaaatatattcaatatt

SEQ ID NO: 67234 - DNA, 50 bp, synthetic construct
  source 1..50: mol_type = other DNA
aatgaatttcaaatttggctcaaaaattggagcgaaaagtacatcgggtt

SEQ ID NO: 67235 - DNA, 50 bp, synthetic construct
  source 1..50: mol_type = other DNA
ttccgaaccgcaccgcttgatcagatgcgacaggctgccgcagaaaggag

SEQ ID NO: 67236 - DNA, 50 bp, synthetic construct
  source 1..50: mol_type = other DNA
aggtagaggaattaaagcgcattgtctataattaataaaaagcagccccg

SEQ ID NO: 67237 - DNA, 50 bp, synthetic construct
  source 1..50: mol_type = other DNA
agtatcgtatcttaactctgattcgaaaatcagatcgcactgctgaaaca

SEQ ID NO: 67238 - DNA, 50 bp, synthetic construct
  source 1..50: mol_type = other DNA
gcaaaaggtaaaaccgctctacatcgatttagcaatagttttgcttttgt

SEQ ID NO: 67239 - DNA, 50 bp, synthetic construct
  source 1..50: mol_type = other DNA
gaagataggaaagcacaaaagtggaatagaaaggcgaacttgttatgctc

SEQ ID NO: 67240 - DNA, 50 bp, synthetic construct
  source 1..50: mol_type = other DNA
gagctagtacagcaagcaatgcgtgataacatagcttgctgtatctgtcg

SEQ ID NO: 67241 - DNA, 50 bp, synthetic construct
  source 1..50: mol_type = other DNA
ccctgtggggctggtttggctggctgggcaggggagccactgccatcggc

SEQ ID NO: 67242 - DNA, 50 bp, synthetic construct
  source 1..50: mol_type = other DNA
gagataccacctttgcagaaagagaatgcgcacatcaaacttggggctga

SEQ ID NO: 67243 - DNA, 50 bp, synthetic construct
  source 1..50: mol_type = other DNA
taaatataggcaaagtaatggacaatttcgcccctcggcatcttgattta

SEQ ID NO: 67244 - DNA, 50 bp, synthetic construct
  source 1..50: mol_type = other DNA
ggagtttctgttttatctggaagtttatccggcataaaaacagagcttcc

SEQ ID NO: 67245 - DNA, 50 bp, synthetic construct
  source 1..50: mol_type = other DNA
ggatagatcaatagcatatttcttcaagtgaatttgctattcgactgtcc

SEQ ID NO: 67246 - DNA, 50 bp, synthetic construct
  source 1..50: mol_type = other DNA
ggttctttcaaaatgtagtttcgtatagtgggtcggatgaagaaagaaat

SEQ ID NO: 67247 - DNA, 50 bp, synthetic construct
  source 1..50: mol_type = other DNA
acttctaattgtgagtgcgtcaacagataagggtcagcaatgaggaaagc

SEQ ID NO: 67248 - DNA, 50 bp, synthetic construct
  source 1..50: mol_type = other DNA
gatagtagttgcaggggatgtactcgatccgataaccgaagggtgtgtgt

SEQ ID NO: 67249 - DNA, 50 bp, synthetic construct
  source 1..50: mol_type = other DNA
ctacatacaaatatcgcaaaaggcgcaaaaagcgcgaattttgtatcaga

SEQ ID NO: 67250 - DNA, 50 bp, synthetic construct
  source 1..50: mol_type = other DNA
atcgagacagcggagcactttattttgaaaaagtgcttgacaactccggg

SEQ ID NO: 67251 - DNA, 50 bp, synthetic construct
  source 1..50: mol_type = other DNA
ggcgtggggaggagattggaaatcatgacgcagaatcaaacacctttgca

SEQ ID NO: 67252 - DNA, 50 bp, synthetic construct
  source 1..50: mol_type = other DNA
agctatactggaaaaaatgaactaattgtatcattttccccggtatatcg

SEQ ID NO: 67253 - DNA, 50 bp, synthetic construct
  source 1..50: mol_type = other DNA
tgaactgctcgataaatccataatggatgatgaggtttccgaatagttta

SEQ ID NO: 67254 - DNA, 50 bp, synthetic construct
  source 1..50: mol_type = other DNA
tgaaagccaataatagcaagtacaattatgaacgcttccattgagatgcg

SEQ ID NO: 67255 - DNA, 50 bp, synthetic construct
  source 1..50: mol_type = other DNA
aatgcctaaagtaaccatgatacccggatttttatattaccgaccgccgg

SEQ ID NO: 67256 - DNA, 50 bp, synthetic construct
  source 1..50: mol_type = other DNA
ataatactctttttctgcctcgtaaatcatggcaagaaaaaagaaagtat

SEQ ID NO: 67257 - DNA, 50 bp, synthetic construct
  source 1..50: mol_type = other DNA
gcaacaaataataatatttttcggtacttatttattttaatctttccgaa

SEQ ID NO: 67258 - DNA, 50 bp, synthetic construct
  source 1..50: mol_type = other DNA
aaggattttattattcaaaaaatggatattttatcaatgaggcgaaaaaa

SEQ ID NO: 67259 - DNA, 50 bp, synthetic construct
  source 1..50: mol_type = other DNA
tcctttcaaaatgccctgttcttccacagggaccggaactcgtggaaggg

SEQ ID NO: 67260 - DNA, 50 bp, synthetic construct
  source 1..50: mol_type = other DNA
ctttggcattgggaggctttatgatataataaacacggctgcgcgaaaat

SEQ ID NO: 67261 - DNA, 50 bp, synthetic construct
  source 1..50: mol_type = other DNA
ggcgtgcctgcttgtcgtgtcgctggcaacgaaatagaaaggggcagaca

SEQ ID NO: 67262 - DNA, 50 bp, synthetic construct
  source 1..50: mol_type = other DNA
cgtaccccggggacaggtttcggtgaatggaaatgattctccgctttccc

SEQ ID NO: 67263 - DNA, 50 bp, synthetic construct
  source 1..50: mol_type = other DNA
tttataggcatttttgtgagttctgcaaaactcgaaaaattgcggattaa

SEQ ID NO: 67264 - DNA, 50 bp, synthetic construct
  source 1..50: mol_type = other DNA
aggtgggcggcaacctcaaccagcttgcaggccgatgttgcggccttaaa

SEQ ID NO: 67265 - DNA, 50 bp, synthetic construct
  source 1..50: mol_type = other DNA
accgacgacagacccgctgtttgagctcgatttctttgtacggcgttgaa

SEQ ID NO: 67266 - DNA, 50 bp, synthetic construct
  source 1..50: mol_type = other DNA
ggctccaccatttttccacgctcatatctgcgtgaaaattcggtcgaaaa

SEQ ID NO: 67267 - DNA, 50 bp, synthetic construct
  source 1..50: mol_type = other DNA
gatttctgccattcaaccactcctttgcacgttcttgcattgcagaaaaa

SEQ ID NO: 67268 - DNA, 50 bp, synthetic construct
  source 1..50: mol_type = other DNA
taaagccatctgaggaaactcaggtgcgctatctggctatacgggcattt

SEQ ID NO: 67269 - DNA, 50 bp, synthetic construct
  source 1..50: mol_type = other DNA
ttcctgtggaatggagctaccaacctacatataatttcattcccagtaca

SEQ ID NO: 67270 - DNA, 50 bp, synthetic construct
  source 1..50: mol_type = other DNA
aacttacagggcctttacatcggcaggccgatgttgcggccttaaaagac

SEQ ID NO: 67271 - DNA, 50 bp, synthetic construct
  source 1..50: mol_type = other DNA
gtttatatttgttcaaaatactacatgtatgataaagaagcaatagaagt

SEQ ID NO: 67272 - DNA, 50 bp, synthetic construct
  source 1..50: mol_type = other DNA
gcgcttgataagccccagcacctcgggagatatccggcacgctcaagccc

SEQ ID NO: 67273 - DNA, 50 bp, synthetic construct
  source 1..50: mol_type = other DNA
actgctacccgctgcccaggcctcgcactggcaaggcagctggctgcaga

SEQ ID NO: 67274 - DNA, 50 bp, synthetic construct
  source 1..50: mol_type = other DNA
tggaaagctcaatatactgccggatatccgggtgtagcgcagttttggta

SEQ ID NO: 67275 - DNA, 50 bp, synthetic construct
  source 1..50: mol_type = other DNA
gcgtagattacggcggtcatggctgcaccggaggtcgccttcatccacgc

SEQ ID NO: 67276 - DNA, 50 bp, synthetic construct
  source 1..50: mol_type = other DNA
ttgtccgcaaacagaatttgctttccgttccaacggctctttgcggatgg

SEQ ID NO: 67277 - DNA, 50 bp, synthetic construct
  source 1..50: mol_type = other DNA
ccagtattcgttcatacgctctcgcaataatagtgcatataacaggagag

SEQ ID NO: 67278 - DNA, 50 bp, synthetic construct
  source 1..50: mol_type = other DNA
atttttcgcataaaatcagctccttttacttattttttatcgtgaaaagt

SEQ ID NO: 67279 - DNA, 50 bp, synthetic construct
  source 1..50: mol_type = other DNA
aggggggttgcattttgaaaaaagaagattattctaaataaaaacagcct

SEQ ID NO: 67280 - DNA, 50 bp, synthetic construct
  source 1..50: mol_type = other DNA
aaaataaatttctacatatagaatatattgtatcaagactaatagtattt

SEQ ID NO: 67281 - DNA, 50 bp, synthetic construct
  source 1..50: mol_type = other DNA
gaaataacaatagcagcagaataaaagaattctgacttttcaattaaata

SEQ ID NO: 67282 - DNA, 50 bp, synthetic construct
  source 1..50: mol_type = other DNA
caacagaagaagggaggaaaataatatttaaaaaaatttttctcctgttg

SEQ ID NO: 67283 - DNA, 50 bp, synthetic construct
  source 1..50: mol_type = other DNA
cacaaaaaattatccgtgtcacttttgcatatttaaaaaaatttttctcc

SEQ ID NO: 67284 - DNA, 50 bp, synthetic construct
  source 1..50: mol_type = other DNA
ccgaaaaaagggtataaaaaagaaaggaatttatcatataaagttttctc

SEQ ID NO: 67285 - DNA, 50 bp, synthetic construct
  source 1..50: mol_type = other DNA
agttcttcgtcgataccgtcaagctcgcttgccaggatttccgtttcttt

SEQ ID NO: 67286 - DNA, 50 bp, synthetic construct
  source 1..50: mol_type = other DNA
aaggacaacgtgttataagaattggcttattctgataattctgaaatacc

SEQ ID NO: 67287 - DNA, 50 bp, synthetic construct
  source 1..50: mol_type = other DNA
tgtgcgtatttgacaaacgctgcatattgattatagcacgtattcgcacg

SEQ ID NO: 67288 - DNA, 50 bp, synthetic construct
  source 1..50: mol_type = other DNA
acattcggcgctatcccatttcgattttctcatgtcttgtaggtgaatgt

SEQ ID NO: 67289 - DNA, 50 bp, synthetic construct
  source 1..50: mol_type = other DNA
acggcttggaaactttttttaaacaccttttcaaatgggttccaatccgt

SEQ ID NO: 67290 - DNA, 50 bp, synthetic construct
  source 1..50: mol_type = other DNA
ttcttttcgctccttattttcttgattaagaaacattttccaaaagcaaa

SEQ ID NO: 67291 - DNA, 50 bp, synthetic construct
  source 1..50: mol_type = other DNA
tcatgccgtgataatataataagcgcagatcctatggtatctgtgcaggg

SEQ ID NO: 67292 - DNA, 50 bp, synthetic construct
  source 1..50: mol_type = other DNA
gccgatagcacttcattcgtcacccagccacgcaagggctcgctgccgtt

SEQ ID NO: 67293 - DNA, 50 bp, synthetic construct
  source 1..50: mol_type = other DNA
taggaaattcacctatgcagacgctatttctgccatagatgaatttgtgg

SEQ ID NO: 67294 - DNA, 50 bp, synthetic construct
  source 1..50: mol_type = other DNA
tgcgggcggcgcggacatcatcctgcggggaaatttaaggcaataccgca

SEQ ID NO: 67295 - DNA, 50 bp, synthetic construct
  source 1..50: mol_type = other DNA
aaatttttatattcacatacaaatttttttaaatgactatattttaattt

SEQ ID NO: 67296 - DNA, 50 bp, synthetic construct
  source 1..50: mol_type = other DNA
tccaacgatctgaaggtcgaaccatacgattgcttattaaattcgcactt

SEQ ID NO: 67297 - DNA, 50 bp, synthetic construct
  source 1..50: mol_type = other DNA
gccttccttttgcactcttgaggaatcaccaaggagtgcattatcaaggc

SEQ ID NO: 67298 - DNA, 50 bp, synthetic construct
  source 1..50: mol_type = other DNA
gtcaaggtcggagaataagatataagtttatatcgcgggattgacttgat

SEQ ID NO: 67299 - DNA, 50 bp, synthetic construct
  source 1..50: mol_type = other DNA
cctgccgggagtttctggaacaggtatggcttgtggaaattcagatcagg

SEQ ID NO: 67300 - DNA, 50 bp, synthetic construct
  source 1..50: mol_type = other DNA
cgcaaaaaaggcacggaggcgccaaaatacttaaaagttttaattgacct

SEQ ID NO: 67301 - DNA, 50 bp, synthetic construct
  source 1..50: mol_type = other DNA
attttttcatgcaaatctcctttttaagccggatttttggacggggaagg

SEQ ID NO: 67302 - DNA, 50 bp, synthetic construct
  source 1..50: mol_type = other DNA
tggtggtcattaaggttatacattatagcagatcatagcaataccgggca

SEQ ID NO: 67303 - DNA, 50 bp, synthetic construct
  source 1..50: mol_type = other DNA
aggaaccgccgaaagtctttcggatgtatcaagggcttccggcgtttttt

SEQ ID NO: 67304 - DNA, 50 bp, synthetic construct
  source 1..50: mol_type = other DNA
tttgttttattaacaattcccatttaactggttgtgtggtagaaatcaaa

SEQ ID NO: 67305 - DNA, 50 bp, synthetic construct
  source 1..50: mol_type = other DNA
tcgaccatcgtgataagctccgggaggaaggagcaggaacaatgagcgaa

SEQ ID NO: 67306 - DNA, 50 bp, synthetic construct
  source 1..50: mol_type = other DNA
gggtgcccgccagcgcatcctgtgcgccaaggaggcgcgccgtgaacatc

SEQ ID NO: 67307 - DNA, 50 bp, synthetic construct
  source 1..50: mol_type = other DNA
tgtttacgttgatttccgttccgcttgcaaagcgagcgtcagccctgaca

SEQ ID NO: 67308 - DNA, 50 bp, synthetic construct
  source 1..50: mol_type = other DNA
actatcacagcaagagttttcaccatattccagccttttagagtgatata

SEQ ID NO: 67309 - DNA, 50 bp, synthetic construct
  source 1..50: mol_type = other DNA
tcaaagggcggcatcgtaccaaattcgtttcggacgatctcgcccatgcg

SEQ ID NO: 67310 - DNA, 50 bp, synthetic construct
  source 1..50: mol_type = other DNA
attcgtaagtaaatattttcataaggtaatgaaaaaatttacaagcctga

SEQ ID NO: 67311 - DNA, 50 bp, synthetic construct
  source 1..50: mol_type = other DNA
tttcttaactccttgccgataaaatagtttgtcggcgggaagaaaggaaa

SEQ ID NO: 67312 - DNA, 50 bp, synthetic construct
  source 1..50: mol_type = other DNA
gtggagtcaactatctggaatactggagtattaaatgagaaatcagtcag

SEQ ID NO: 67313 - DNA, 50 bp, synthetic construct
  source 1..50: mol_type = other DNA
cttgtttactccagccatagaatttaatttctatgcgtaaaggaggtgat

SEQ ID NO: 67314 - DNA, 50 bp, synthetic construct
  source 1..50: mol_type = other DNA
tggataaatgtgaagaagaaaagcatgatgttttctacaacacttatcat

SEQ ID NO: 67315 - DNA, 50 bp, synthetic construct
  source 1..50: mol_type = other DNA
ctggaatttgtaatcgaccttgtttaaacaaggtctgttaatttttataa

SEQ ID NO: 67316 - DNA, 50 bp, synthetic construct
  source 1..50: mol_type = other DNA
atcccccggatttaggggcttttcttttactggaaataaatccattttcc

SEQ ID NO: 67317 - DNA, 50 bp, synthetic construct
  source 1..50: mol_type = other DNA
cttttttgttgcttgatgtaccatttaaaaataatcaaaaaggaagtgtt

SEQ ID NO: 67318 - DNA, 50 bp, synthetic construct
  source 1..50: mol_type = other DNA
agcttgcgagacatggtagaatatccttgttctacagtctctttattgaa

SEQ ID NO: 67319 - DNA, 50 bp, synthetic construct
  source 1..50: mol_type = other DNA
acacatataataaatgaattataaatttataatatctatatatgcgaccg

SEQ ID NO: 67320 - DNA, 50 bp, synthetic construct
  source 1..50: mol_type = other DNA
tctgcataacgaatactgtttaaaattttcgttaaactctttaatccact

SEQ ID NO: 67321 - DNA, 50 bp, synthetic construct
  source 1..50: mol_type = other DNA
aatatttttgcggtcaacctaggcatatttccattgactataattatttt

SEQ ID NO: 67322 - DNA, 50 bp, synthetic construct
  source 1..50: mol_type = other DNA
tttcagttataatattatatagatgatttataataatgttacaaaacgcc

SEQ ID NO: 67323 - DNA, 50 bp, synthetic construct
  source 1..50: mol_type = other DNA
tctgcttttctcctttttttcaactgcttcaaaaatgtgagaaaacgaga

SEQ ID NO: 67324 - DNA, 50 bp, synthetic construct
  source 1..50: mol_type = other DNA
aattatttgttgtatattggcatttacctgcttttatcggaggaaaaatg

SEQ ID NO: 67325 - DNA, 50 bp, synthetic construct
  source 1..50: mol_type = other DNA
taaaagaagttacttttttgtaacttattcaaaagatattcctattttta

SEQ ID NO: 67326 - DNA, 50 bp, synthetic construct
  source 1..50: mol_type = other DNA
tcgttccacaaccactttctccactagtggcgatgctccagccggagccg

SEQ ID NO: 67327 - DNA, 50 bp, synthetic construct
  source 1..50: mol_type = other DNA
tttgacttgtggcactctcaacgtccagagtaaggattccaaactgagca

SEQ ID NO: 67328 - DNA, 50 bp, synthetic construct
  source 1..50: mol_type = other DNA
tgtggactatcagaaggcttttcaagtgagaacccttaagacggtaagcg

SEQ ID NO: 67329 - DNA, 50 bp, synthetic construct
  source 1..50: mol_type = other DNA
ccatttttcacccctcctttgcgccagcaaaaagaaacgcaaaaaggcat

SEQ ID NO: 67330 - DNA, 50 bp, synthetic construct
  source 1..50: mol_type = other DNA
tgatgttgtggtttccgtccctgtccacagcgttacgcgccaggtgtgtg

SEQ ID NO: 67331 - DNA, 50 bp, synthetic construct
  source 1..50: mol_type = other DNA
tcttattccctcgtgtgggcttgaaaccaatcacccatcgggcgataagg

SEQ ID NO: 67332 - DNA, 50 bp, synthetic construct
  source 1..50: mol_type = other DNA
gatgcgtttgtaaaaagcaactgaaacttggctccgacatcaaacaaatc

SEQ ID NO: 67333 - DNA, 50 bp, synthetic construct
  source 1..50: mol_type = other DNA
cagatcactgaacaggtcagccttgtgtcatttgtctgttcatcaatact

SEQ ID NO: 67334 - DNA, 50 bp, synthetic construct
  source 1..50: mol_type = other DNA
atttttcttaaattcggcatgaaatcacggatgcacaattacagaataca

SEQ ID NO: 67335 - DNA, 50 bp, synthetic construct
  source 1..50: mol_type = other DNA
aattgttgaagattttattgataaaattatcaatattttattccaaaatt

SEQ ID NO: 67336 - DNA, 50 bp, synthetic construct
  source 1..50: mol_type = other DNA
aaagccctctccgacacaaaagtgcccacttccgagtgggagataacaca

SEQ ID NO: 67337 - DNA, 50 bp, synthetic construct
  source 1..50: mol_type = other DNA
tttcccacgaaaacccttatttttcgaaaaaaggaggacttcgtatggct

SEQ ID NO: 67338 - DNA, 50 bp, synthetic construct
  source 1..50: mol_type = other DNA
ttctgacagatctgcggccgtgagcgtcagcagaagctgatcgttgcctg

SEQ ID NO: 67339 - DNA, 50 bp, synthetic construct
  source 1..50: mol_type = other DNA
taacagcttttcccccttgttatgcacaagcaaataaggaaatactgtct

SEQ ID NO: 67340 - DNA, 50 bp, synthetic construct
  source 1..50: mol_type = other DNA
atcagtcccaatggtacaaaggtgcggcggacgtcgttgtaggcgtagat

SEQ ID NO: 67341 - DNA, 50 bp, synthetic construct
  source 1..50: mol_type = other DNA
agcgggattaccgcgatgaacgacgcgtctggcaggatcgctcccgcgct

SEQ ID NO: 67342 - DNA, 50 bp, synthetic construct
  source 1..50: mol_type = other DNA
ctgtttctggtgctggctgctgtcccctgcacatccagcacctgccacgc

SEQ ID NO: 67343 - DNA, 50 bp, synthetic construct
  source 1..50: mol_type = other DNA
tgatgcaaagataattacactacataggtagtctttttagtgaagacgaa

SEQ ID NO: 67344 - DNA, 50 bp, synthetic construct
  source 1..50: mol_type = other DNA
agcagatgagcaatcagctcaatagccctccttgatctgctcgggcgtga

SEQ ID NO: 67345 - DNA, 50 bp, synthetic construct
  source 1..50: mol_type = other DNA
attcttttttcgggccatcaaccatcatcggaaatatcagcacatggaat

SEQ ID NO: 67346 - DNA, 50 bp, synthetic construct
  source 1..50: mol_type = other DNA
gtatttccgttgatttttatggtaagaacaataataaataacaaaaataa

SEQ ID NO: 67347 - DNA, 50 bp, synthetic construct
  source 1..50: mol_type = other DNA
caatatctggaaaacgtgcgtcttatgtcgcggcctttttcattatcgga

SEQ ID NO: 67348 - DNA, 50 bp, synthetic construct
  source 1..50: mol_type = other DNA
ttaactgcaagaggctattttgtcaaaacaccgcaatttcttgcggtgtc

SEQ ID NO: 67349 - DNA, 50 bp, synthetic construct
  source 1..50: mol_type = other DNA
tacagcatttaatgctcgtacaagttgttgttattatcataaatggtgta

SEQ ID NO: 67350 - DNA, 50 bp, synthetic construct
  source 1..50: mol_type = other DNA
caaaactatgacggccgtcctctccggaataatataccttggatttttct

SEQ ID NO: 67351 - DNA, 50 bp, synthetic construct
  source 1..50: mol_type = other DNA
acttttcaaagtacacggcattttgcaaatgcccaattccgggaaagagt

SEQ ID NO: 67352 - DNA, 50 bp, synthetic construct
  source 1..50: mol_type = other DNA
gctaaatcaacaacctgtacttctcctgatttgtagattgcttatttagt

SEQ ID NO: 67353 - DNA, 50 bp, synthetic construct
  source 1..50: mol_type = other DNA
agcctggaagtgttgatgaagatttgcaggctcatgcccagttccagggc

SEQ ID NO: 67354 - DNA, 50 bp, synthetic construct
  source 1..50: mol_type = other DNA
acgtctatctatgcctctgaagaaggttcatagagaagatcgtcactgta

SEQ ID NO: 67355 - DNA, 50 bp, synthetic construct
  source 1..50: mol_type = other DNA
tcaccgccatcccggccagggtgcagacctgctctccggcctgcaggcaa

SEQ ID NO: 67356 - DNA, 50 bp, synthetic construct
  source 1..50: mol_type = other DNA
ggccgggtcgctttttccttttatccataacctgaaacggcggaagggag

SEQ ID NO: 67357 - DNA, 50 bp, synthetic construct
  source 1..50: mol_type = other DNA
tcatcttagtttaaatttattttgtacaaaataatttacaaaaaatctac

SEQ ID NO: 67358 - DNA, 50 bp, synthetic construct
  source 1..50: mol_type = other DNA
cgagtaaaaagcaggtctttatcgctttttgcccttatgcttttatctcc

SEQ ID NO: 67359 - DNA, 50 bp, synthetic construct
  source 1..50: mol_type = other DNA
ttttatttacagtccgcatgaaaaatttttcccttgcggtgtaaagggtg

SEQ ID NO: 67360 - DNA, 50 bp, synthetic construct
  source 1..50: mol_type = other DNA
cacctccataaatttatagggaaatgtttccccgtttccttctggacatg

SEQ ID NO: 67361 - DNA, 50 bp, synthetic construct
  source 1..50: mol_type = other DNA
ctctgaatataaatatcttttttgatctgctctgtcgttacagcctcaac

SEQ ID NO: 67362 - DNA, 50 bp, synthetic construct
  source 1..50: mol_type = other DNA
aagtacaatctgcgatacctttcacctttgacataaggcatatatcaatt

SEQ ID NO: 67363 - DNA, 50 bp, synthetic construct
  source 1..50: mol_type = other DNA
gaccgatgacgagtggattgagctgctgcgcatggtgctccgcatcgcgg

SEQ ID NO: 67364 - DNA, 50 bp, synthetic construct
  source 1..50: mol_type = other DNA
cctccttcggctcaccggccgccatgtggataagtcactgctcatagtga

SEQ ID NO: 67365 - DNA, 50 bp, synthetic construct
  source 1..50: mol_type = other DNA
atggcaccgtcctcccttcccgggatccggacggtcagcttctcgatcat

SEQ ID NO: 67366 - DNA, 50 bp, synthetic construct
  source 1..50: mol_type = other DNA
aaaaatagccataattcatatcgagcttgcaacccggtttggccttggtt

SEQ ID NO: 67367 - DNA, 50 bp, synthetic construct
  source 1..50: mol_type = other DNA
atattaaccatcctttctgtaaaatattatgcagaaattaaggataaata

SEQ ID NO: 67368 - DNA, 50 bp, synthetic construct
  source 1..50: mol_type = other DNA
acaactttggcacacagcctcagaattccgggtgcgctccgcaaaattga

SEQ ID NO: 67369 - DNA, 50 bp, synthetic construct
  source 1..50: mol_type = other DNA
tccacctcctaaaatttaaaaaaagacacacggtccatttctcaggcggc

SEQ ID NO: 67370 - DNA, 50 bp, synthetic construct
  source 1..50: mol_type = other DNA
atcaaggcgtggcagtcccgagcttcacttcgctgctgccacgatttctg

SEQ ID NO: 67371 - DNA, 50 bp, synthetic construct
  source 1..50: mol_type = other DNA
cggaatctacgctcgcactgttcgcgcgtaggcggcgacctttctgcgtg

SEQ ID NO: 67372 - DNA, 50 bp, synthetic construct
  source 1..50: mol_type = other DNA
ctttatttatgttttggaaagtgaggtcaccgtcctgctgaaaaataacc

SEQ ID NO: 67373 - DNA, 50 bp, synthetic construct
  source 1..50: mol_type = other DNA
tccaccacccagctggaggaacactgatttttgtcacgtttggatatgga

SEQ ID NO: 67374 - DNA, 50 bp, synthetic construct
  source 1..50: mol_type = other DNA
tcctatccattccaaaatcaggcccttggcgcacattgggcaggggagcc

SEQ ID NO: 67375 - DNA, 50 bp, synthetic construct
  source 1..50: mol_type = other DNA
cttagtggtgggatataatttttgttataatatcatactcaactaaaaac

SEQ ID NO: 67376 - DNA, 50 bp, synthetic construct
  source 1..50: mol_type = other DNA
aaggcgcataaaaattagaaacgcgctgttgtctgtcctttctgcggctg

SEQ ID NO: 67377 - DNA, 50 bp, synthetic construct
  source 1..50: mol_type = other DNA
tgttgtactaacttaacactacccgtgggctgtgttaagttagtacaaaa

SEQ ID NO: 67378 - DNA, 50 bp, synthetic construct
  source 1..50: mol_type = other DNA
tatatactgcattttcagtcatttcaaaattatattgattggagaattat

SEQ ID NO: 67379 - DNA, 50 bp, synthetic construct
  source 1..50: mol_type = other DNA
tatcgaggtgtacgatgattttgctggcgcggtcttcgtacacctcgatg

SEQ ID NO: 67380 - DNA, 50 bp, synthetic construct
  source 1..50: mol_type = other DNA
aggaggctttctgcttctcccagcctccattttgaatttgatagccgaaa

SEQ ID NO: 67381 - DNA, 50 bp, synthetic construct
  source 1..50: mol_type = other DNA
aaccgccagccggatgtggtcccagcgcctaccgattccctgcggcggtg

SEQ ID NO: 67382 - DNA, 50 bp, synthetic construct
  source 1..50: mol_type = other DNA
tccaccagacgcaggggcttctcaccacagaagcctctgcttttaccacc

SEQ ID NO: 67383 - DNA, 50 bp, synthetic construct
  source 1..50: mol_type = other DNA
acatcggctggcgaatagccagggcatcctgaatatacgccactttatgg

SEQ ID NO: 67384 - DNA, 50 bp, synthetic construct
  source 1..50: mol_type = other DNA
ggtcaggctacttgtaaggagcctttaggcgcgttgcagatatgtttttg

SEQ ID NO: 67385 - DNA, 50 bp, synthetic construct
  source 1..50: mol_type = other DNA
tcaatttgagtcagaccgtcttcaatcgttctcgctctgagagctggacg

SEQ ID NO: 67386 - DNA, 50 bp, synthetic construct
  source 1..50: mol_type = other DNA
aatcatattcatctgtcattttatcatttaaagtttgcaaggattgaatt

SEQ ID NO: 67387 - DNA, 50 bp, synthetic construct
  source 1..50: mol_type = other DNA
acgttgttctggggtgattacgcgattttaagtacaatccagtagaatca

SEQ ID NO: 67388 - DNA, 50 bp, synthetic construct
  source 1..50: mol_type = other DNA
atctgcatctggttttaccggctgaaagaaaggtgaaaggtatccaagaa

SEQ ID NO: 67389 - DNA, 50 bp, synthetic construct
  source 1..50: mol_type = other DNA
acagaactatgcaagtaatttctttaaagaaagccatcagcgtattctgt

SEQ ID NO: 67390 - DNA, 50 bp, synthetic construct
  source 1..50: mol_type = other DNA
agggcaaaacaagcagaattaaaattttcgcgtactgctttggaggtgct

SEQ ID NO: 67391 - DNA, 50 bp, synthetic construct
  source 1..50: mol_type = other DNA
gggacttaagcgtactgtatacagagctgtaaactctacgaataaatttt

SEQ ID NO: 67392 - DNA, 50 bp, synthetic construct
  source 1..50: mol_type = other DNA
tgtagactgacattgacctctaaaggtttagagcttaataaaaagccgct

SEQ ID NO: 67393 - DNA, 50 bp, synthetic construct
  source 1..50: mol_type = other DNA
gcctgtttattgacgagagccattttcatggctaaaatcataaaggtcga

SEQ ID NO: 67394 - DNA, 50 bp, synthetic construct
  source 1..50: mol_type = other DNA
cctttgtgtagatactgttgccgaactgctcgaaaggaggaacacaaatg

SEQ ID NO: 67395 - DNA, 50 bp, synthetic construct
  source 1..50: mol_type = other DNA
aattaaaaacaacagaactattaggttcagggagtctattgttttttttt

SEQ ID NO: 67396 - DNA, 50 bp, synthetic construct
  source 1..50: mol_type = other DNA
gcgtcccaatcagtaccatatggtaaaacacatgttccactttggaacgc

SEQ ID NO: 67397 - DNA, 50 bp, synthetic construct
  source 1..50: mol_type = other DNA
cattcattttcaggtaagcaaaaagcggataattcccctgacaataaaaa

SEQ ID NO: 67398 - DNA, 50 bp, synthetic construct
  source 1..50: mol_type = other DNA
ggccacggcgtgtatcatggagggcgtccactatggcccacgcctgttcc

SEQ ID NO: 67399 - DNA, 50 bp, synthetic construct
  source 1..50: mol_type = other DNA
cgttgtattgagagcatcgggcgacaccatgaccttctcccggaccctgg

SEQ ID NO: 67400 - DNA, 50 bp, synthetic construct
  source 1..50: mol_type = other DNA
ctataagcaagctaaccaatgatagagtgcccatgtttacgtgcttacag

SEQ ID NO: 67401 - DNA, 50 bp, synthetic construct
  source 1..50: mol_type = other DNA
tgaagaccgctcatattcttctttcgaaagctgcatatatcttgtcttct

SEQ ID NO: 67402 - DNA, 50 bp, synthetic construct
  source 1..50: mol_type = other DNA
ttttccttgctgccgtcttcccggtaccctgcagtatgctgcaactcgaa

SEQ ID NO: 67403 - DNA, 50 bp, synthetic construct
  source 1..50: mol_type = other DNA
attggattatcaaaattttcagttatcgatgatatggatgataagacaaa

SEQ ID NO: 67404 - DNA, 50 bp, synthetic construct
  source 1..50: mol_type = other DNA
atatacatcactctaaatgtcacaattgtgaagagcagaattatgaatat

SEQ ID NO: 67405 - DNA, 50 bp, synthetic construct
  source 1..50: mol_type = other DNA
gatgattttgtctaaataccaacgcgcctttctctttttaacggtttaga

SEQ ID NO: 67406 - DNA, 50 bp, synthetic construct
  source 1..50: mol_type = other DNA
gatattatccagcaatattgcggaaaagcgcgttctccaaatttaatatc

SEQ ID NO: 67407 - DNA, 50 bp, synthetic construct
  source 1..50: mol_type = other DNA
agcctgccaatgctgacaagcgtcatgactctaatctttaatgccttaat

SEQ ID NO: 67408 - DNA, 50 bp, synthetic construct
  source 1..50: mol_type = other DNA
tctttgacttatgcaccaagtttatcagaacatggttcacaagtcaagga

SEQ ID NO: 67409 - DNA, 50 bp, synthetic construct
  source 1..50: mol_type = other DNA
ggaggatgacgcaatggaaatcctaacgaatgtccatgcttccatcctca

SEQ ID NO: 67410 - DNA, 50 bp, synthetic construct
  source 1..50: mol_type = other DNA
cgaaagggaaatgcatatgaacgaatccgactttctgcattgcacttagt

SEQ ID NO: 67411 - DNA, 50 bp, synthetic construct
  source 1..50: mol_type = other DNA
gcctcgtataaacatcgcatcgccaaggcgattcgtctgtcctgacgggc

SEQ ID NO: 67412 - DNA, 50 bp, synthetic construct
  source 1..50: mol_type = other DNA
gcttattgtggacgctgtgtccgatatcgggcatattgctgcccgtttcc

SEQ ID NO: 67413 - DNA, 50 bp, synthetic construct
  source 1..50: mol_type = other DNA
atagatattctttagatgtgtatcatgaatatgattgttcgactgtcgga

SEQ ID NO: 67414 - DNA, 50 bp, synthetic construct
  source 1..50: mol_type = other DNA
atgcttgcctgtttttcttatttattcgggatagaataacatcaaattca

SEQ ID NO: 67415 - DNA, 50 bp, synthetic construct
  source 1..50: mol_type = other DNA
ctcccctgcctgctctggggatagtgttgccaccagagaagcgccgcctt

SEQ ID NO: 67416 - DNA, 50 bp, synthetic construct
  source 1..50: mol_type = other DNA
acggcgacgccgatcaaggcggaaaccattgcggcgattagaatggccgc

SEQ ID NO: 67417 - DNA, 50 bp, synthetic construct
  source 1..50: mol_type = other DNA
agcgggaaaaacactgccgcgcaaaattacctggcaggaaccatcccgcg

SEQ ID NO: 67418 - DNA, 50 bp, synthetic construct
  source 1..50: mol_type = other DNA
tgaagaattatctaatgaaataataacttctttcaagagaacatattttc

SEQ ID NO: 67419 - DNA, 50 bp, synthetic construct
  source 1..50: mol_type = other DNA
cgttctgttacattttagcacataagttggtgctactatttctgtaattc

SEQ ID NO: 67420 - DNA, 50 bp, synthetic construct
  source 1..50: mol_type = other DNA
ttgcaagtgagaagcatccaaggaaggaggaggaaacatggcacaggcaa

SEQ ID NO: 67421 - DNA, 50 bp, synthetic construct
  source 1..50: mol_type = other DNA
aagttggagataccagccgaggtgatcttgttgagaatgtagtcctcgag

SEQ ID NO: 67422 - DNA, 50 bp, synthetic construct
  source 1..50: mol_type = other DNA
cggactgtacaaacttatgatcgacggccgtcatagttttgtcggctccg

SEQ ID NO: 67423 - DNA, 50 bp, synthetic construct
  source 1..50: mol_type = other DNA
taagagtaagaccttcctgctttatatatatcgcgaaaagccttgacttt

SEQ ID NO: 67424 - DNA, 50 bp, synthetic construct
  source 1..50: mol_type = other DNA
ggtatatctttcgctcctacctgcaaggagtcagcatggaaagaaaggtc

SEQ ID NO: 67425 - DNA, 50 bp, synthetic construct
  source 1..50: mol_type = other DNA
aggcaaggaggaaaaagaaatgagcaagtctttctttttcatctttcgat

SEQ ID NO: 67426 - DNA, 50 bp, synthetic construct
  source 1..50: mol_type = other DNA
tggacatttcccgctctaccgtgcaggcaaggaggaaaaagaaatgagca

SEQ ID NO: 67427 - DNA, 50 bp, synthetic construct
  source 1..50: mol_type = other DNA
agacgccgagcgccacatcgtcgtggaggacggtgccatgcgcggcgtca

SEQ ID NO: 67428 - DNA, 50 bp, synthetic construct
  source 1..50: mol_type = other DNA
ttagatgttccgtcctcgtctcgtttgctggacggggacaagtatcagaa

SEQ ID NO: 67429 - DNA, 50 bp, synthetic construct
  source 1..50: mol_type = other DNA
aagctgcttgctgtgtgcctgatggccgcttcatccacatggaagatctt

SEQ ID NO: 67430 - DNA, 50 bp, synthetic construct
  source 1..50: mol_type = other DNA
gatgccataataatttcatagcactagtactataaaaaataaagttatga

SEQ ID NO: 67431 - DNA, 50 bp, synthetic construct
  source 1..50: mol_type = other DNA
caatctcctacttttatgcaaaaatactacatataataagaaggttttgg

SEQ ID NO: 67432 - DNA, 50 bp, synthetic construct
  source 1..50: mol_type = other DNA
gccgatagcacttcattcgtcacccagccacgcaagggcttgctgccgtt

SEQ ID NO: 67433 - DNA, 50 bp, synthetic construct
  source 1..50: mol_type = other DNA
ataatacaaatgtaagtcgtaaaattttttagcagttaaattttgaacat

SEQ ID NO: 67434 - DNA, 50 bp, synthetic construct
  source 1..50: mol_type = other DNA
ttgcaggaagaaactgtagtataatctgctccaattttttttagttgctt

SEQ ID NO: 67435 - DNA, 50 bp, synthetic construct
  source 1..50: mol_type = other DNA
attacaattgaagattctgctgaactataagaaaattcttcaataagccc

SEQ ID NO: 67436 - DNA, 50 bp, synthetic construct
  source 1..50: mol_type = other DNA
attggcggtgcaaagcgtttcacaaagagaaaaggctccgcaccaccaat

SEQ ID NO: 67437 - DNA, 50 bp, synthetic construct
  source 1..50: mol_type = other DNA
cgattagtcaagcaataaaagggctatttctaacacgtatggtactttgc

SEQ ID NO: 67438 - DNA, 50 bp, synthetic construct
  source 1..50: mol_type = other DNA
ccgtcttttcaaacggcagttcttatacctctgttccatccgggaagcgg

SEQ ID NO: 67439 - DNA, 50 bp, synthetic construct
  source 1..50: mol_type = other DNA
taatcatttcttattttctctcattattcgttggaaatgcgaaatgaata

SEQ ID NO: 67440 - DNA, 50 bp, synthetic construct
  source 1..50: mol_type = other DNA
tcgttacaaaactcaatgatggttaaaaccatccctagtatttgtaacgc

SEQ ID NO: 67441 - DNA, 50 bp, synthetic construct
  source 1..50: mol_type = other DNA
ttttcaggtaagcaaaaagcagggaaataagcgttttatatactcgaaac

SEQ ID NO: 67442 - DNA, 50 bp, synthetic construct
  source 1..50: mol_type = other DNA
aaatcttcctttccaatgatctgtccggtcgcgcttggaaagggcgtggt

SEQ ID NO: 67443 - DNA, 50 bp, synthetic construct
  source 1..50: mol_type = other DNA
ctatgaacaaaacggagaaaaatcaagatttttcttcaatttttccaaaa

SEQ ID NO: 67444 - DNA, 50 bp, synthetic construct
  source 1..50: mol_type = other DNA
gggaggcaaacatgatataatacaaatgtctgctatctggttttgaagag

SEQ ID NO: 67445 - DNA, 50 bp, synthetic construct
  source 1..50: mol_type = other DNA
tgatcgtatgtatgtccatttggtgcgctcgtaggactcaatcattttct

SEQ ID NO: 67446 - DNA, 50 bp, synthetic construct
  source 1..50: mol_type = other DNA
tgcggcgtgtgaaattgctgcggcgggcttgcgcggattcagacgcagcc

SEQ ID NO: 67447 - DNA, 50 bp, synthetic construct
  source 1..50: mol_type = other DNA
attttgccgtttggagtgtatagtgagcaacggtctccaaaaccgtaggt

SEQ ID NO: 67448 - DNA, 50 bp, synthetic construct
  source 1..50: mol_type = other DNA
cttggtgtagaccatatctgtcatcgaaagttgatatgacgattaaaaag

SEQ ID NO: 67449 - DNA, 50 bp, synthetic construct
  source 1..50: mol_type = other DNA
ctcttgccgtactcgatgatattggcgcaccacagcgtttctggcaaggt

SEQ ID NO: 67450 - DNA, 50 bp, synthetic construct
  source 1..50: mol_type = other DNA
ttagatgatttattttatcgaggaactgcccgatgtaataaatcatctat

SEQ ID NO: 67451 - DNA, 50 bp, synthetic construct
  source 1..50: mol_type = other DNA
ttcgacgaagaattcctccttctgtacaccagtagttatagttcatatcg

SEQ ID NO: 67452 - DNA, 50 bp, synthetic construct
  source 1..50: mol_type = other DNA
tccagaagctctctacgcggcggaaatccgccgcaccctgcgaatccgcg

SEQ ID NO: 67453 - DNA, 50 bp, synthetic construct
  source 1..50: mol_type = other DNA
cggtgctggtgacctgcgggggaagctgagttttcagggcacccgctatc

SEQ ID NO: 67454 - DNA, 50 bp, synthetic construct
  source 1..50: mol_type = other DNA
tcgaaaagaattcagccgttgctcaagatcaacaactcttcagtaaatca

SEQ ID NO: 67455 - DNA, 50 bp, synthetic construct
  source 1..50: mol_type = other DNA
ctataaccccaagtaacgtgtcattagcgacattcgccttcatgattccc

SEQ ID NO: 67456 - DNA, 50 bp, synthetic construct
  source 1..50: mol_type = other DNA
taaaaaattaccttctttctaaaattttgggtgtgttatttatttttttt

SEQ ID NO: 67457 - DNA, 50 bp, synthetic construct
  source 1..50: mol_type = other DNA
aatttgcttgagctcacacatgcgaagaggggtgatccctcaatctccta

SEQ ID NO: 67458 - DNA, 50 bp, synthetic construct
  source 1..50: mol_type = other DNA
aagatattccgcacaatgcctgcttcctcagttgagatgaccgttctgcc

SEQ ID NO: 67459 - DNA, 50 bp, synthetic construct
  source 1..50: mol_type = other DNA
aaaaacgcaggactcacctgaaccgaaaatcaagcattatcctcgttttc

SEQ ID NO: 67460 - DNA, 50 bp, synthetic construct
  source 1..50: mol_type = other DNA
tagcttaaatacgttatttcagaattttctctccttaatatagttagctt

SEQ ID NO: 67461 - DNA, 50 bp, synthetic construct
  source 1..50: mol_type = other DNA
gttgtgtttacataatttttgtgatatcataaatttaaaataattactac

SEQ ID NO: 67462 - DNA, 50 bp, synthetic construct
  source 1..50: mol_type = other DNA
ataaaaatggtggagcataggagattttgtcgatgctacatggattttat

SEQ ID NO: 67463 - DNA, 50 bp, synthetic construct
  source 1..50: mol_type = other DNA
gacgtgccgccttcgccgatgacggtggtcattgtttccggcggcggaag

SEQ ID NO: 67464 - DNA, 50 bp, synthetic construct
  source 1..50: mol_type = other DNA
ggtcacgctcctttctgcggtcgcttgcgacattcgtgaagattgtggag

SEQ ID NO: 67465 - DNA, 50 bp, synthetic construct
  source 1..50: mol_type = other DNA
aaaacctttggcatgaataccggtttgccggtattacggtaacggtttta

SEQ ID NO: 67466 - DNA, 50 bp, synthetic construct
  source 1..50: mol_type = other DNA
cttaaaacagtgttatttacaaatttcgcatcaagtgaaatgaaataaat

SEQ ID NO: 67467 - DNA, 50 bp, synthetic construct
  source 1..50: mol_type = other DNA
gaaagcggttctttctttttcatgctcattaaaaatcaactcctaattta

SEQ ID NO: 67468 - DNA, 50 bp, synthetic construct
  source 1..50: mol_type = other DNA
gtacatcccatacgggtacacgatgcagcgtgtccgtgaatgcgatgacc

SEQ ID NO: 67469 - DNA, 50 bp, synthetic construct
  source 1..50: mol_type = other DNA
cttgtcgaagaatccgtctaagtgtaccattaacgatattcctcaaaaag

SEQ ID NO: 67470 - DNA, 50 bp, synthetic construct
  source 1..50: mol_type = other DNA
catttcgctttcatgacctcgctcatgtgcgagagctatcaagatatata

SEQ ID NO: 67471 - DNA, 50 bp, synthetic construct
  source 1..50: mol_type = other DNA
gacttaaaaaatgataaatttgattataaaagaatatcatattttagtat

SEQ ID NO: 67472 - DNA, 50 bp, synthetic construct
  source 1..50: mol_type = other DNA
gacttaaaaaatgataaatttgattattcaaaaggtgcattactcaatat

SEQ ID NO: 67473 - DNA, 50 bp, synthetic construct
  source 1..50: mol_type = other DNA
aaaaaggtcaaggaaacaggcaatgcagccactttttatggacgaagttt

SEQ ID NO: 67474 - DNA, 50 bp, synthetic construct
  source 1..50: mol_type = other DNA
tgaacaggatggaaatcttgataacgtaatcgccatttcgctgctggttt

SEQ ID NO: 67475 - DNA, 50 bp, synthetic construct
  source 1..50: mol_type = other DNA
ctgaacgccaacaaaacggcaactgctgggcctgtaaatttgaaaggagc

SEQ ID NO: 67476 - DNA, 50 bp, synthetic construct
  source 1..50: mol_type = other DNA
tctatttgagaaagtctcgtgcagatctgcatccgtttatctccctgata

SEQ ID NO: 67477 - DNA, 50 bp, synthetic construct
  source 1..50: mol_type = other DNA
tcactattaagccttgatattactagttaaaagccagttgagatatgtac

SEQ ID NO: 67478 - DNA, 50 bp, synthetic construct
  source 1..50: mol_type = other DNA
cccatttaacgaaaataggcttacatttgtggttttcctctttatgtgtt

SEQ ID NO: 67479 - DNA, 50 bp, synthetic construct
  source 1..50: mol_type = other DNA
tggccaaatccgtaaccacgataccggctccggttcaacgctcattgcct

SEQ ID NO: 67480 - DNA, 50 bp, synthetic construct
  source 1..50: mol_type = other DNA
tggtactttttatattccttatttgaaaataaggagcgaaaagaaatggc

SEQ ID NO: 67481 - DNA, 50 bp, synthetic construct
  source 1..50: mol_type = other DNA
tgggctgcacacaatcaaggcaaattcctgaggtgattccatgcagcaag

SEQ ID NO: 67482 - DNA, 50 bp, synthetic construct
  source 1..50: mol_type = other DNA
ggcgcagggtatcacggaacagctaaaagccttcctttttaccgtgttca

SEQ ID NO: 67483 - DNA, 50 bp, synthetic construct
  source 1..50: mol_type = other DNA
gcaacggatacagatggcggactggcctaagtgccgcttgccgggctccg

SEQ ID NO: 67484 - DNA, 50 bp, synthetic construct
  source 1..50: mol_type = other DNA
gctctttcatctctctaattccatttatcaagcatattgctgcaaaaggc

SEQ ID NO: 67485 - DNA, 50 bp, synthetic construct
  source 1..50: mol_type = other DNA
catggagtccttcttggcctgctcaatagcagccctcccacaacggtttg

SEQ ID NO: 67486 - DNA, 50 bp, synthetic construct
  source 1..50: mol_type = other DNA
acgccgccgattagtcaagcaatagctccatcttgtttaacctccggctc

SEQ ID NO: 67487 - DNA, 50 bp, synthetic construct
  source 1..50: mol_type = other DNA
ccattttgccagttcatccgataccttcaaatgtatttttgagaatattc

SEQ ID NO: 67488 - DNA, 50 bp, synthetic construct
  source 1..50: mol_type = other DNA
tatcgcaaaatagcgtaaaatgccccgatcttttttgctcgttgttgata

SEQ ID NO: 67489 - DNA, 50 bp, synthetic construct
  source 1..50: mol_type = other DNA
aacactagtgtagttacatctctatatgaccatgagtgaaaactacgctg

SEQ ID NO: 67490 - DNA, 50 bp, synthetic construct
  source 1..50: mol_type = other DNA
cttttaatttctacttttattacaattatagaaaaattagagtttagcta

SEQ ID NO: 67491 - DNA, 50 bp, synthetic construct
  source 1..50: mol_type = other DNA
attaaattaggtttaatatgggatttgtaccataatttgaataatttaaa

SEQ ID NO: 67492 - DNA, 50 bp, synthetic construct
  source 1..50: mol_type = other DNA
ggctttttcatgggtttatggggtacaccaaccaaacttatgaaacaacg

SEQ ID NO: 67493 - DNA, 50 bp, synthetic construct
  source 1..50: mol_type = other DNA
attttctaactggaacagccgtgtgaatttcattgaaaactgtagagaaa

SEQ ID NO: 67494 - DNA, 50 bp, synthetic construct
  source 1..50: mol_type = other DNA
caaggcggccttcctgcgttaacgcagacaaacgcaggaaggcaatgagc

SEQ ID NO: 67495 - DNA, 50 bp, synthetic construct
  source 1..50: mol_type = other DNA
gctccggcgtgacatatattcctgcggcgcaacccgaaacaataatattt

SEQ ID NO: 67496 - DNA, 50 bp, synthetic construct
  source 1..50: mol_type = other DNA
agaaaattatcgtaatggcacccggcctggaggcattctaagaatgtctg

SEQ ID NO: 67497 - DNA, 50 bp, synthetic construct
  source 1..50: mol_type = other DNA
tacatgatgcgcatgactgtaaccgtggcggtcttggcatagatatgtcc

SEQ ID NO: 67498 - DNA, 50 bp, synthetic construct
  source 1..50: mol_type = other DNA
attgcgctcacgccagttcttcctgtcggcggaatgactgtgaccgaccg

SEQ ID NO: 67499 - DNA, 50 bp, synthetic construct
  source 1..50: mol_type = other DNA
ttttttgtgtttttctgcaaaaaaattttgccgactttatttctggaaat

SEQ ID NO: 67500 - DNA, 50 bp, synthetic construct
  source 1..50: mol_type = other DNA
ccgggttatatttaggcataaaaaatttttcattgctaagcacggtacgc

SEQ ID NO: 67501 - DNA, 50 bp, synthetic construct
  source 1..50: mol_type = other DNA
ccctataaggcggtggtgcttttcgcgaaaagctccgccgccagccagga

SEQ ID NO: 67502 - DNA, 50 bp, synthetic construct
  source 1..50: mol_type = other DNA
gagaacagatcctgcgcttcgggattccccgaaaagagggatatatggtt

SEQ ID NO: 67503 - DNA, 50 bp, synthetic construct
  source 1..50: mol_type = other DNA
acaatacggagataaatacatatctttattggcttttagagtgatagata

SEQ ID NO: 67504 - DNA, 50 bp, synthetic construct
  source 1..50: mol_type = other DNA
acaatataaggttacagccatagcatgcaaaacagagacggaagtatcag

SEQ ID NO: 67505 - DNA, 50 bp, synthetic construct
  source 1..50: mol_type = other DNA
tagattccaagtcatcaaaaatgttaaggtttttgaatacatgctttcta

SEQ ID NO: 67506 - DNA, 50 bp, synthetic construct
  source 1..50: mol_type = other DNA
gaatgaagcagtaaattgtatttaatgtcatactatctaaaccttcttta

SEQ ID NO: 67507 - DNA, 50 bp, synthetic construct
  source 1..50: mol_type = other DNA
gctggccgtttttcagggtaagggtcacgccggaggcgaaccagtcgagc

SEQ ID NO: 67508 - DNA, 50 bp, synthetic construct
  source 1..50: mol_type = other DNA
ctcccttcggcaaacagtcaaatgattttcccactggtagccgaagggaa

SEQ ID NO: 67509 - DNA, 50 bp, synthetic construct
  source 1..50: mol_type = other DNA
accaatggctaaagtactaccggagcttcaaaagaccttcgtgaacaatc

SEQ ID NO: 67510 - DNA, 50 bp, synthetic construct
  source 1..50: mol_type = other DNA
aaaaaagccctaccgctgcgtgagcggtcaacgggcacaagatgtatgac

SEQ ID NO: 67511 - DNA, 50 bp, synthetic construct
  source 1..50: mol_type = other DNA
cccttatacaattctgttctaattctgctaaaaacagagttccgaaatct

SEQ ID NO: 67512 - DNA, 50 bp, synthetic construct
  source 1..50: mol_type = other DNA
ctgcctgcatttttcatgcgcggaatgggtacggtgaaaaaagccaggaa

SEQ ID NO: 67513 - DNA, 50 bp, synthetic construct
  source 1..50: mol_type = other DNA
tttatataaaaagaatgtgccgtatttataactttttccttttctctgtc

SEQ ID NO: 67514 - DNA, 50 bp, synthetic construct
  source 1..50: mol_type = other DNA
tcttgcgccctttgaaacgccggacgtccggcgatgaaccgggcggctta

SEQ ID NO: 67515 - DNA, 50 bp, synthetic construct
  source 1..50: mol_type = other DNA
cggatacacttagcaccccacggcttttgggaaaatgacaagttcgaaat

SEQ ID NO: 67516 - DNA, 50 bp, synthetic construct
  source 1..50: mol_type = other DNA
aacggcccggcagggtaaaaaggcatggttttgtgttcctcggcattatt

SEQ ID NO: 67517 - DNA, 50 bp, synthetic construct
  source 1..50: mol_type = other DNA
aattgattgttttatatctgttaaatttctaaattataaaacaactcata

SEQ ID NO: 67518 - DNA, 50 bp, synthetic construct
  source 1..50: mol_type = other DNA
agggttgcaacatattattttaaagaatttatataaaacgtttcggaggt

SEQ ID NO: 67519 - DNA, 50 bp, synthetic construct
  source 1..50: mol_type = other DNA
cgaaagaagaaaaataaaagcagatctagggctttttgttatttatagag

SEQ ID NO: 67520 - DNA, 50 bp, synthetic construct
  source 1..50: mol_type = other DNA
taggcgggagtacatcggcatacagctcctctttacaaattgcccgttat

SEQ ID NO: 67521 - DNA, 50 bp, synthetic construct
  source 1..50: mol_type = other DNA
ttcttcttttggcatcgccgtataaatggactggatctgcaaaggaagaa

SEQ ID NO: 67522 - DNA, 50 bp, synthetic construct
  source 1..50: mol_type = other DNA
tagtcaagcaatagcggcgctatttcttttttgccggaatctggctgtta

SEQ ID NO: 67523 - DNA, 50 bp, synthetic construct
  source 1..50: mol_type = other DNA
ttgttttttcaacgctttgacattttaataaatattagttgcaaaaagtt

SEQ ID NO: 67524 - DNA, 50 bp, synthetic construct
  source 1..50: mol_type = other DNA
tgtccaaggattgtggacttaactatagttttgtcggctccgaatggaac

SEQ ID NO: 67525 - DNA, 50 bp, synthetic construct
  source 1..50: mol_type = other DNA
atcaataaattccagcaactcatccggatgagccggaagaagaaaatgat

SEQ ID NO: 67526 - DNA, 50 bp, synthetic construct
  source 1..50: mol_type = other DNA
acctttcacctttcttttcttggcatgcccagaaaagaaacatgcagtcc

SEQ ID NO: 67527 - DNA, 50 bp, synthetic construct
  source 1..50: mol_type = other DNA
gttgagattgtcaaaaaacacttgcgttactgtttgggtacaaaatttac

SEQ ID NO: 67528 - DNA, 50 bp, synthetic construct
  source 1..50: mol_type = other DNA
cctatgcccagacgcattattttgcgaaaaagaattgacctggagagacc

SEQ ID NO: 67529 - DNA, 50 bp, synthetic construct
  source 1..50: mol_type = other DNA
gaatgataacactttgtatgtaccgaggtgacgagaaagataaagaacgg

SEQ ID NO: 67530 - DNA, 50 bp, synthetic construct
  source 1..50: mol_type = other DNA
gactgattttgctgttgttgaaaggtccactaccaaaggagggatctgat

SEQ ID NO: 67531 - DNA, 50 bp, synthetic construct
  source 1..50: mol_type = other DNA
aagttggtgtccaatttttgtgttattacacaaaacttggagttctatta

SEQ ID NO: 67532 - DNA, 50 bp, synthetic construct
  source 1..50: mol_type = other DNA
ggtctccctgacgacttggatgcgggtcgttcttggcggtcagggcaaaa

SEQ ID NO: 67533 - DNA, 50 bp, synthetic construct
  source 1..50: mol_type = other DNA
gattagtcaagcaataaaagggctatttctctagctttcattatacgttc

SEQ ID NO: 67534 - DNA, 50 bp, synthetic construct
  source 1..50: mol_type = other DNA
ggcacatattgttataatggcgttgaaattaacttatgacaaatgcggtt

SEQ ID NO: 67535 - DNA, 50 bp, synthetic construct
  source 1..50: mol_type = other DNA
tgtcgacgatgagcccctggtgcgcctcaagcagggttacaacggcgacc

SEQ ID NO: 67536 - DNA, 50 bp, synthetic construct
  source 1..50: mol_type = other DNA
tctatgcgtgtgacaccaacgccacgtggcggcggttttccactgctttt

SEQ ID NO: 67537 - DNA, 50 bp, synthetic construct
  source 1..50: mol_type = other DNA
tccccgcgtggccgcatatatctcttgagatctatagccccatgctgggg

SEQ ID NO: 67538 - DNA, 50 bp, synthetic construct
  source 1..50: mol_type = other DNA
ctgaggtacagcatatgtgtcccgtccggatatggcatggagtaccgctg

SEQ ID NO: 67539 - DNA, 50 bp, synthetic construct
  source 1..50: mol_type = other DNA
gttcactgatgtatgtctccttttataatacacaacatatttgtcatcga

SEQ ID NO: 67540 - DNA, 50 bp, synthetic construct
  source 1..50: mol_type = other DNA
gggttttttcaatttcatttttctgtatgaagatgaaattgccaagatgc

SEQ ID NO: 67541 - DNA, 50 bp, synthetic construct
  source 1..50: mol_type = other DNA
ctctaacattcttttgcattctttttaaagaaacaaaaaaagagctcttc

SEQ ID NO: 67542 - DNA, 50 bp, synthetic construct
  source 1..50: mol_type = other DNA
tctaaatgatgtatatatcaagtgttgcattgatatattacttttttata

SEQ ID NO: 67543 - DNA, 50 bp, synthetic construct
  source 1..50: mol_type = other DNA
tgggaactctgctcttcggcgctccccttgaccgaagagcagaagaagca

SEQ ID NO: 67544 - DNA, 50 bp, synthetic construct
  source 1..50: mol_type = other DNA
aaaccgattgcttcaatgtcattgcggaatcgacttgatatatgatggtt

SEQ ID NO: 67545 - DNA, 50 bp, synthetic construct
  source 1..50: mol_type = other DNA
tatttttatagaatgaaagataaccgatggactttgagtctgctttcgga

SEQ ID NO: 67546 - DNA, 50 bp, synthetic construct
  source 1..50: mol_type = other DNA
tctgcggcaagctgccttgccagtgcgaggcctgggcagcgggtagcagt

SEQ ID NO: 67547 - DNA, 50 bp, synthetic construct
  source 1..50: mol_type = other DNA
atacagccctccttttctttgccaaacgcaagcaaaaaggagctgaatgc

SEQ ID NO: 67548 - DNA, 50 bp, synthetic construct
  source 1..50: mol_type = other DNA
agaccgcttcccgctgcttgtcgttcaacacaaagagcggcgtgcaaatc

SEQ ID NO: 67549 - DNA, 50 bp, synthetic construct
  source 1..50: mol_type = other DNA
gaaattcgtaggaatcacctcccttgttgaaggtgatggcctcgacgttc

SEQ ID NO: 67550 - DNA, 50 bp, synthetic construct
  source 1..50: mol_type = other DNA
ccctccttcagccattggtgatactcgcccattctgatttttgtggagaa

SEQ ID NO: 67551 - DNA, 50 bp, synthetic construct
  source 1..50: mol_type = other DNA
tatatcactctttacgagccggaagtttattgcactcaaagtgttattta

SEQ ID NO: 67552 - DNA, 50 bp, synthetic construct
  source 1..50: mol_type = other DNA
ttataaggattcttaatgcaaaaataattttccattttatgaccttatga

SEQ ID NO: 67553 - DNA, 50 bp, synthetic construct
  source 1..50: mol_type = other DNA
ataaccttgtcgtcgctgaaatcgtccgggtgtagcgcagttttggtagc

SEQ ID NO: 67554 - DNA, 50 bp, synthetic construct
  source 1..50: mol_type = other DNA
tctgtgtttttctctatccaacaaatttgttgggtatttatataggaagt

SEQ ID NO: 67555 - DNA, 50 bp, synthetic construct
  source 1..50: mol_type = other DNA
atatcacctttcctttttttatgttaagtagtagttacgagatccttgta

SEQ ID NO: 67556 - DNA, 50 bp, synthetic construct
  source 1..50: mol_type = other DNA
tggactcaacctctgtattaacaacaaccaaaatacgagagaggaggaca

SEQ ID NO: 67557 - DNA, 50 bp, synthetic construct
  source 1..50: mol_type = other DNA
catcgtggatgttcttctgaatcgcatgatcccggcagaactccacgcaa

SEQ ID NO: 67558 - DNA, 50 bp, synthetic construct
  source 1..50: mol_type = other DNA
gcatacaatcccggcgaaacccttgctattgtacagaaggaggaattctt

SEQ ID NO: 67559 - DNA, 50 bp, synthetic construct
  source 1..50: mol_type = other DNA
ggtgagatatgtaaacgcttttctcgggaaaacccttgatataactggct

SEQ ID NO: 67560 - DNA, 50 bp, synthetic construct
  source 1..50: mol_type = other DNA
acgacaacagcggagtgaggcaaaattttgcctttgtgagcgggacatct

SEQ ID NO: 67561 - DNA, 50 bp, synthetic construct
  source 1..50: mol_type = other DNA
cagcacggcgcacttcacgcgcgcggtagcgcgcgacattcgcattgtcg

SEQ ID NO: 67562 - DNA, 50 bp, synthetic construct
  source 1..50: mol_type = other DNA
cattatcagctatgtttttggcaattggcagaaatggaaagagaagaagc

SEQ ID NO: 67563 - DNA, 50 bp, synthetic construct
  source 1..50: mol_type = other DNA
agcattttaaaattacagcatcttgaggcgttgaagcattttaagatgct

SEQ ID NO: 67564 - DNA, 50 bp, synthetic construct
  source 1..50: mol_type = other DNA
attccggcaaccaagaaccgattcacggaaccccacttttctgcaagaac

SEQ ID NO: 67565 - DNA, 50 bp, synthetic construct
  source 1..50: mol_type = other DNA
gacgcagacattgtatcaatatctgcctgaaatgaaggaaaaagcgcgtc

SEQ ID NO: 67566 - DNA, 50 bp, synthetic construct
  source 1..50: mol_type = other DNA
tacttacgataaggatggtacattaaataatatttctaaggttgtaagca

SEQ ID NO: 67567 - DNA, 50 bp, synthetic construct
  source 1..50: mol_type = other DNA
tgaggtctgatgcacttctcccgctggcgggagcagtccgaatgacgatt

SEQ ID NO: 67568 - DNA, 50 bp, synthetic construct
  source 1..50: mol_type = other DNA
tcttccgcttgtaaaatatctcgaaagcccgacataatgaagttccgagg

SEQ ID NO: 67569 - DNA, 50 bp, synthetic construct
  source 1..50: mol_type = other DNA
gacagttctctttttttgtgcatagtttgtccggtagaaaaggaactggc

SEQ ID NO: 67570 - DNA, 50 bp, synthetic construct
  source 1..50: mol_type = other DNA
tcaatcttagttttgccattctcccaaaagaaattaaaaacgagaggtga

SEQ ID NO: 67571 - DNA, 50 bp, synthetic construct
  source 1..50: mol_type = other DNA
gcatatttttactcctttcatttttcaagataaaacgtgggaaaaaagag

SEQ ID NO: 67572 - DNA, 50 bp, synthetic construct
  source 1..50: mol_type = other DNA
tatgcaggcgtatcagttcgtgctatagctgaaacctatccgtttctggt

SEQ ID NO: 67573 - DNA, 50 bp, synthetic construct
  source 1..50: mol_type = other DNA
ggactttccgggttcgccttttcacgtcaaaaaactctagcggaatttcc

SEQ ID NO: 67574 - DNA, 50 bp, synthetic construct
  source 1..50: mol_type = other DNA
ccgaattgaaaacggaaaggccttaatgctcccggccgtggtcgccgctc

SEQ ID NO: 67575 - DNA, 50 bp, synthetic construct
  source 1..50: mol_type = other DNA
tacttaaaatggaagcttgaaatatcaattccaagcttgtccccaatgta

SEQ ID NO: 67576 - DNA, 50 bp, synthetic construct
  source 1..50: mol_type = other DNA
tgcgttctgcacaacggcggctgcgggcagcaccgtttgaatcgagtcca

SEQ ID NO: 67577 - DNA, 50 bp, synthetic construct
  source 1..50: mol_type = other DNA
catggataatgctaatattagatttaaatgattgcaaatcgttaaatttg

SEQ ID NO: 67578 - DNA, 50 bp, synthetic construct
  source 1..50: mol_type = other DNA
ttgcaactgaaattggaaaaagtccttcatttttctttgctcctttgcat

SEQ ID NO: 67579 - DNA, 50 bp, synthetic construct
  source 1..50: mol_type = other DNA
gacacgcactacgccggagaagaaaattgaaggaaggcgctgaccttgtc

SEQ ID NO: 67580 - DNA, 50 bp, synthetic construct
  source 1..50: mol_type = other DNA
cataaaaatatgggacagcccataccgcaggctacaccgatatttataag

SEQ ID NO: 67581 - DNA, 50 bp, synthetic construct
  source 1..50: mol_type = other DNA
actaacctttatttcgattagtgtaaaacataatcgaggttatgcgttct

SEQ ID NO: 67582 - DNA, 50 bp, synthetic construct
  source 1..50: mol_type = other DNA
cagctctcatatctgttacatttaatctgataatatatatatgacctgtg

SEQ ID NO: 67583 - DNA, 50 bp, synthetic construct
  source 1..50: mol_type = other DNA
attcagaaattcgtcaaagcggaagctgtaaactctacgaataaatttta

SEQ ID NO: 67584 - DNA, 50 bp, synthetic construct
  source 1..50: mol_type = other DNA
gtctttctgtatctgcttgatcttctgtgaggaaggagctacaaaatgaa

SEQ ID NO: 67585 - DNA, 50 bp, synthetic construct
  source 1..50: mol_type = other DNA
gcgattctgccgatataaggtataattatggcgaatatacgcagaattga

SEQ ID NO: 67586 - DNA, 50 bp, synthetic construct
  source 1..50: mol_type = other DNA
gtatagattatgacaaaataagagaaggtttatttgctcaaaatatagaa

SEQ ID NO: 67587 - DNA, 50 bp, synthetic construct
  source 1..50: mol_type = other DNA
gcattattattcccccttctgttcatgacgaggaggggggagacacatgg

SEQ ID NO: 67588 - DNA, 50 bp, synthetic construct
  source 1..50: mol_type = other DNA
tgacaaagatctcctaaacgattttcaagccgtttctgcgattctcctat

SEQ ID NO: 67589 - DNA, 50 bp, synthetic construct
  source 1..50: mol_type = other DNA
agggcataatctttgcgattgccggcggtcacgggcaaagaaattgccgc

SEQ ID NO: 67590 - DNA, 50 bp, synthetic construct
  source 1..50: mol_type = other DNA
tctatttgagaaagtctcgtgcagatctgtatccgtttatctccctgata

SEQ ID NO: 67591 - DNA, 50 bp, synthetic construct
  source 1..50: mol_type = other DNA
tatcaattccatcataagtgtgctattgctcacttatgatggaacttatg

SEQ ID NO: 67592 - DNA, 50 bp, synthetic construct
  source 1..50: mol_type = other DNA
tgggcctccggggtgagctcgcgccagggcatactccaccacttggcgca

SEQ ID NO: 67593 - DNA, 50 bp, synthetic construct
  source 1..50: mol_type = other DNA
gtatggatgaatccctgcccatgcggaattgtgcagcttatccgccattt

SEQ ID NO: 67594 - DNA, 50 bp, synthetic construct
  source 1..50: mol_type = other DNA
caaccggttatgagccgggggctctagagacctcagtgggtaacctcccg

SEQ ID NO: 67595 - DNA, 50 bp, synthetic construct
  source 1..50: mol_type = other DNA
agcgataaagaaaaactccaatttattttttcgggaatttccttatccgt

SEQ ID NO: 67596 - DNA, 50 bp, synthetic construct
  source 1..50: mol_type = other DNA
acaaggagaagaacacacagcgtattcaaagctttcatcctgctcgttgc

SEQ ID NO: 67597 - DNA, 50 bp, synthetic construct
  source 1..50: mol_type = other DNA
tataaaggtctaattcactctcatatatgagtttttcgtatataattata

SEQ ID NO: 67598 - DNA, 50 bp, synthetic construct
  source 1..50: mol_type = other DNA
aaaagtctttttgcatggggttaatatcaacttcggagagggtgactttt

SEQ ID NO: 67599 - DNA, 50 bp, synthetic construct
  source 1..50: mol_type = other DNA
cgcgccaaaagaattcctcctgcggcagttggagggcttttttcgtcggc

SEQ ID NO: 67600 - DNA, 50 bp, synthetic construct
  source 1..50: mol_type = other DNA
tattctaccatatctggccgcaaactttttcgagcaaatattatatgata

SEQ ID NO: 67601 - DNA, 50 bp, synthetic construct
  source 1..50: mol_type = other DNA
ttgtatcacaggttccatgctttgtgtccgcgaaatggtcgttgaaaaga

SEQ ID NO: 67602 - DNA, 50 bp, synthetic construct
  source 1..50: mol_type = other DNA
atgaaggcaagtatgcggttctcccagaaaaatctgctacttgccctcat

SEQ ID NO: 67603 - DNA, 50 bp, synthetic construct
  source 1..50: mol_type = other DNA
tgtattatgtgtactctgaataattaatatgtcacactaccgaagggagg

SEQ ID NO: 67604 - DNA, 50 bp, synthetic construct
  source 1..50: mol_type = other DNA
tgtatgtttttcggctctcatttatctgaatgagtgggtggatttctatt

SEQ ID NO: 67605 - DNA, 50 bp, synthetic construct
  source 1..50: mol_type = other DNA
tgtttggtctgaaacgatctttcttgataaaaacgatttcaaaacacgga

SEQ ID NO: 67606 - DNA, 50 bp, synthetic construct
  source 1..50: mol_type = other DNA
caagtccggtataaaaagccttttgtcgcaggccttttcacgcttcttct

SEQ ID NO: 67607 - DNA, 50 bp, synthetic construct
  source 1..50: mol_type = other DNA
aaggcgggcaataaagaggcctttgcaggaaaagagaataaccccgcctt

SEQ ID NO: 67608 - DNA, 50 bp, synthetic construct
  source 1..50: mol_type = other DNA
gctttccccaaatccatctgccctaacctggggatgcggacggtgaaagc

SEQ ID NO: 67609 - DNA, 50 bp, synthetic construct
  source 1..50: mol_type = other DNA
cggcgaggtgccggagcttacgcccgaagggcgtttcacaaatcccgcag

SEQ ID NO: 67610 - DNA, 50 bp, synthetic construct
  source 1..50: mol_type = other DNA
gctgcaaagcatcaggtgataaaagacttgatatatacatcatttagagt

SEQ ID NO: 67611 - DNA, 50 bp, synthetic construct
  source 1..50: mol_type = other DNA
acagaaataaatggataaaaataattaacgttttatcaacaatattctgt

SEQ ID NO: 67612 - DNA, 50 bp, synthetic construct
  source 1..50: mol_type = other DNA
cagcatatcgcgaagaaatgctatgattcgcgccaaatcgcgatatgctg

SEQ ID NO: 67613 - DNA, 50 bp, synthetic construct
  source 1..50: mol_type = other DNA
gaagaggcgaaaatcgtcaaacgtatttgtcggttttgttctgcctcttt

SEQ ID NO: 67614 - DNA, 50 bp, synthetic construct
  source 1..50: mol_type = other DNA
ccgcatatttcccacgcctccggccagcatgagcgagacgaagtattcaa

SEQ ID NO: 67615 - DNA, 50 bp, synthetic construct
  source 1..50: mol_type = other DNA
atttgcattaatcattattgaatccagtatttattttttctttctttgat

SEQ ID NO: 67616 - DNA, 50 bp, synthetic construct
  source 1..50: mol_type = other DNA
atttctgttctgtcaaggaagaatttcagtttcattaacaacgaatatgt

SEQ ID NO: 67617 - DNA, 50 bp, synthetic construct
  source 1..50: mol_type = other DNA
tctgaaaaaatagaacgatatccagtgccatatcaatctatcctttcctt

SEQ ID NO: 67618 - DNA, 50 bp, synthetic construct
  source 1..50: mol_type = other DNA
ttctataggcttccatcttacaaaatttctgaagtacgcgataaataccg

SEQ ID NO: 67619 - DNA, 50 bp, synthetic construct
  source 1..50: mol_type = other DNA
aaaccaataattatgctttcaataaacaacccatccaggcttattgcttg

SEQ ID NO: 67620 - DNA, 50 bp, synthetic construct
  source 1..50: mol_type = other DNA
tttttagaaatatcgaaaatatataatattaaacgaatttccagtagatt

SEQ ID NO: 67621 - DNA, 50 bp, synthetic construct
  source 1..50: mol_type = other DNA
gtaacgcttcttgccattcttatcatgatcagattcatgcccagaacaac

SEQ ID NO: 67622 - DNA, 50 bp, synthetic construct
  source 1..50: mol_type = other DNA
taatcgtaattccaagctaactaaatttatttaacttattattataattt

SEQ ID NO: 67623 - DNA, 50 bp, synthetic construct
  source 1..50: mol_type = other DNA
taaataaaacttgctttaatggtctgctccacgcaaatatgagatattgc

SEQ ID NO: 67624 - DNA, 50 bp, synthetic construct
  source 1..50: mol_type = other DNA
aaaatgggtataaaaataacagctagtcttgttccttgcttactgcgttt

SEQ ID NO: 67625 - DNA, 50 bp, synthetic construct
  source 1..50: mol_type = other DNA
agatatacactacaagatttagtgtacttaaaaagttatactgtatatgt

SEQ ID NO: 67626 - DNA, 50 bp, synthetic construct
  source 1..50: mol_type = other DNA
cgcatctgccttcggtggcagcacggaaaaagcccatgaagccccacaaa

SEQ ID NO: 67627 - DNA, 50 bp, synthetic construct
  source 1..50: mol_type = other DNA
ctttctttgcggtcttggggaataattattgtttacacccgcttcgatag

SEQ ID NO: 67628 - DNA, 50 bp, synthetic construct
  source 1..50: mol_type = other DNA
gtcacgccccgtagaaaccaaggtcgacatggaaaaagcacgggcggtcg

SEQ ID NO: 67629 - DNA, 50 bp, synthetic construct
  source 1..50: mol_type = other DNA
gatgggagacaggtaaagatactattagatatctttttatttctccactt

SEQ ID NO: 67630 - DNA, 50 bp, synthetic construct
  source 1..50: mol_type = other DNA
gaattttgtcatttaaaaaaatttaagtatattttcgtgaggtgcaatat

SEQ ID NO: 67631 - DNA, 50 bp, synthetic construct
  source 1..50: mol_type = other DNA
ggaggagctcatcgatcccaacaccagctgcggaatccgggaggccgtgt

SEQ ID NO: 67632 - DNA, 50 bp, synthetic construct
  source 1..50: mol_type = other DNA
tcaatttcaacaatattacccattaaagaagttgataagcttatgaatga

SEQ ID NO: 67633 - DNA, 50 bp, synthetic construct
  source 1..50: mol_type = other DNA
aaggtgcttaaactttctgataaccagttcgcagaaaggggcttagcccc

SEQ ID NO: 67634 - DNA, 50 bp, synthetic construct
  source 1..50: mol_type = other DNA
cttgtttttcttgacttccagagcgtgaggtgatggttgatggcccgaaa

SEQ ID NO: 67635 - DNA, 50 bp, synthetic construct
  source 1..50: mol_type = other DNA
gtatattgggctgacatctgctcaatccagctcatctcaattcaactcca

SEQ ID NO: 67636 - DNA, 50 bp, synthetic construct
  source 1..50: mol_type = other DNA
aagaagaattaataaaattaaatgaaattttatataggtaaattctttta

SEQ ID NO: 67637 - DNA, 50 bp, synthetic construct
  source 1..50: mol_type = other DNA
tcctttctgtatttcgtgttaaaatagtcccccaaacaaggtctattata

SEQ ID NO: 67638 - DNA, 50 bp, synthetic construct
  source 1..50: mol_type = other DNA
caattccatcattagtgtgcaggttctactgcacaccaatgatggatatc

SEQ ID NO: 67639 - DNA, 50 bp, synthetic construct
  source 1..50: mol_type = other DNA
tatctttttttgcgtattttcaagatcttcattccattcaaaaatagcta

SEQ ID NO: 67640 - DNA, 50 bp, synthetic construct
  source 1..50: mol_type = other DNA
ttgttattttatcacgtttcccacgataaggatattgcctatcataactc

SEQ ID NO: 67641 - DNA, 50 bp, synthetic construct
  source 1..50: mol_type = other DNA
tgtgcaacgaatgtcagttattgacgacagatacaagcaatcggtgcagc

SEQ ID NO: 67642 - DNA, 50 bp, synthetic construct
  source 1..50: mol_type = other DNA
gcgaattttgcggtttccgaccttctttctgattaaaataaatattttaa

SEQ ID NO: 67643 - DNA, 50 bp, synthetic construct
  source 1..50: mol_type = other DNA
ttcaagcctgcccgcggcattccaaaaggaggtgagcgggtgtggatgaa

SEQ ID NO: 67644 - DNA, 50 bp, synthetic construct
  source 1..50: mol_type = other DNA
tccttacatatttttcagcaggccctgatcttctgaaaaacaccgtatcc

SEQ ID NO: 67645 - DNA, 50 bp, synthetic construct
  source 1..50: mol_type = other DNA
tataaagaaaatcaataaaaaaacgcatttttgacataattttataatta

SEQ ID NO: 67646 - DNA, 50 bp, synthetic construct
  source 1..50: mol_type = other DNA
attttcggtataaaattttttgataaatcaaattatttcatactgttttc

SEQ ID NO: 67647 - DNA, 50 bp, synthetic construct
  source 1..50: mol_type = other DNA
tatctccttctggcgtgggcagcggccgtttccgacggcgtggacagcga

SEQ ID NO: 67648 - DNA, 50 bp, synthetic construct
  source 1..50: mol_type = other DNA
cgtgatgatgcgatacctcggcgcttgcgcttttctgcaatgggtgtggc

SEQ ID NO: 67649 - DNA, 50 bp, synthetic construct
  source 1..50: mol_type = other DNA
atgaagttgttgacggtgttgggcgctcgaacgtcctcagaccgcttcag

SEQ ID NO: 67650 - DNA, 50 bp, synthetic construct
  source 1..50: mol_type = other DNA
tgaaaagctgtgggtgtttgccaatgccccaaaaggttcatggcttttcc

SEQ ID NO: 67651 - DNA, 50 bp, synthetic construct
  source 1..50: mol_type = other DNA
caggaagagcgggaggtccttctcaccggaatgtcctgcggactgtccgg

SEQ ID NO: 67652 - DNA, 50 bp, synthetic construct
  source 1..50: mol_type = other DNA
ctatgcacacccattccattccttttaaaaaacagaaaggttgtgtatat

SEQ ID NO: 67653 - DNA, 50 bp, synthetic construct
  source 1..50: mol_type = other DNA
tgagaacagtttgctgcgctccactctattaacgcatagcagatttctcc

SEQ ID NO: 67654 - DNA, 50 bp, synthetic construct
  source 1..50: mol_type = other DNA
tccttgccctgcccccccagcctggttccgctgatgccgcaggtcaaact

SEQ ID NO: 67655 - DNA, 50 bp, synthetic construct
  source 1..50: mol_type = other DNA
tgcatggcaaaaaaagctgcggtcatgaaggcaatgtcctctattatgac

SEQ ID NO: 67656 - DNA, 50 bp, synthetic construct
  source 1..50: mol_type = other DNA
tccgacagcccggagaatgccacacggcagacactctccgcttcgttgcc

SEQ ID NO: 67657 - DNA, 50 bp, synthetic construct
  source 1..50: mol_type = other DNA
gttcggggattttttgttttagtgatttgacggacggcaagcaggttgtc

SEQ ID NO: 67658 - DNA, 50 bp, synthetic construct
  source 1..50: mol_type = other DNA
gctctgcaattcttgcaggattgtcagcaagcgttttcgacttgccagtg

SEQ ID NO: 67659 - DNA, 50 bp, synthetic construct
  source 1..50: mol_type = other DNA
cgaagtgtgtccagtatctttttcccttaaaagagtgtgggttcaaatcc

SEQ ID NO: 67660 - DNA, 50 bp, synthetic construct
  source 1..50: mol_type = other DNA
acgtatagtttttatttaaaattgtttatagtaaatgattgacaatatct

SEQ ID NO: 67661 - DNA, 50 bp, synthetic construct
  source 1..50: mol_type = other DNA
tctctcagtagaattaatatcttcaagttgataagcttatgaatgaggag

SEQ ID NO: 67662 - DNA, 50 bp, synthetic construct
  source 1..50: mol_type = other DNA
ttcattttatctaatcgtgatttagtttaatatgttcataccgaaaggag

SEQ ID NO: 67663 - DNA, 50 bp, synthetic construct
  source 1..50: mol_type = other DNA
gaaatcaaatgcccacaaaataatattttacaaagcaggcagaatattta

SEQ ID NO: 67664 - DNA, 50 bp, synthetic construct
  source 1..50: mol_type = other DNA
cagcaggcgtgttttcttatcctatgatagttgagagtgctttcctgctg

SEQ ID NO: 67665 - DNA, 50 bp, synthetic construct
  source 1..50: mol_type = other DNA
ctaataaccgcctttctctttatacggatgaagagataatggacttttat

SEQ ID NO: 67666 - DNA, 50 bp, synthetic construct
  source 1..50: mol_type = other DNA
aacttcgacctctttgtttttcagctcctctttacaaattgcccgttatt

SEQ ID NO: 67667 - DNA, 50 bp, synthetic construct
  source 1..50: mol_type = other DNA
cattgatcgctcaacatatgcataataatatccatgatgaatggtcgctt

SEQ ID NO: 67668 - DNA, 50 bp, synthetic construct
  source 1..50: mol_type = other DNA
atttttcttaataacacttgaaaaatgttaaaatattttataaataaaat

SEQ ID NO: 67669 - DNA, 50 bp, synthetic construct
  source 1..50: mol_type = other DNA
taccttcccgtgcagttggtgtcacgctgccgttattgcacaatacagct

SEQ ID NO: 67670 - DNA, 50 bp, synthetic construct
  source 1..50: mol_type = other DNA
tcgatgtgacggataaccaatctgagctctggaattagccgtcaaatggg

SEQ ID NO: 67671 - DNA, 50 bp, synthetic construct
  source 1..50: mol_type = other DNA
aaagcacaccccgttggcggtaatcataggccgcaaacaagccgtgctgt

SEQ ID NO: 67672 - DNA, 50 bp, synthetic construct
  source 1..50: mol_type = other DNA
tttatgagagtgccgattatcacaatgaatatattctggcaaagaataag

SEQ ID NO: 67673 - DNA, 50 bp, synthetic construct
  source 1..50: mol_type = other DNA
ggtatagtcaaaataacagcgcccgcgggtatgtccatttttagcagtta

SEQ ID NO: 67674 - DNA, 50 bp, synthetic construct
  source 1..50: mol_type = other DNA
atacacagcgcctcattgggcttgatataggctcttgcttcgctcatttt

SEQ ID NO: 67675 - DNA, 50 bp, synthetic construct
  source 1..50: mol_type = other DNA
gctattccgtacaaagattgtaccattatactgcatttgtattgaactac

SEQ ID NO: 67676 - DNA, 50 bp, synthetic construct
  source 1..50: mol_type = other DNA
tccaccattgctcacggtattcggggccgccatccagaagtacaacgacc

SEQ ID NO: 67677 - DNA, 50 bp, synthetic construct
  source 1..50: mol_type = other DNA
gcaatgttgcggatatcgtccagcacaaaaccggacaaagaaaattttat

SEQ ID NO: 67678 - DNA, 50 bp, synthetic construct
  source 1..50: mol_type = other DNA
gaattgaacatatccaccgccgcagacgcttttgtgcgccctttttcctc

SEQ ID NO: 67679 - DNA, 50 bp, synthetic construct
  source 1..50: mol_type = other DNA
atattccctcttatgaggggaactatttccagctgcaccagatcgaatac

SEQ ID NO: 67680 - DNA, 50 bp, synthetic construct
  source 1..50: mol_type = other DNA
agatgttttttctccgaatcgccaaattgtccgaagctgaacaaaaggct

SEQ ID NO: 67681 - DNA, 50 bp, synthetic construct
  source 1..50: mol_type = other DNA
gtgtgtactaataggtattaaccgaatggtcatgcactattggtacacaa

SEQ ID NO: 67682 - DNA, 50 bp, synthetic construct
  source 1..50: mol_type = other DNA
ggtgtttgacaaacacaggcgttaaaatacgccaaaaccgcggaaacaca

SEQ ID NO: 67683 - DNA, 50 bp, synthetic construct
  source 1..50: mol_type = other DNA
aaacgaggttgcgcgaattgaaaacgcttgctattcgcgcagctatgagc

SEQ ID NO: 67684 - DNA, 50 bp, synthetic construct
  source 1..50: mol_type = other DNA
ttgccgtataaaaaaactctgttaaagacaaggaggcgttttttatgcaa

SEQ ID NO: 67685 - DNA, 50 bp, synthetic construct
  source 1..50: mol_type = other DNA
gagatattgttttataattctgaaaagaaaaaattataaaagaatatcat

SEQ ID NO: 67686 - DNA, 50 bp, synthetic construct
  source 1..50: mol_type = other DNA
gactgagaattcttccggtaaacaatattgtaccttaaaaatacttgcaa

SEQ ID NO: 67687 - DNA, 50 bp, synthetic construct
  source 1..50: mol_type = other DNA
actttataacgatgaatccgcaaacgcttgcattttcaaccaggtcaagg

SEQ ID NO: 67688 - DNA, 50 bp, synthetic construct
  source 1..50: mol_type = other DNA
tctgctttccccaaatccatctgcccggggatgcggacggtgaaagcagc

SEQ ID NO: 67689 - DNA, 50 bp, synthetic construct
  source 1..50: mol_type = other DNA
aagccaataatagcaagtacaatctggattgttacgctcgttaatgagtt

SEQ ID NO: 67690 - DNA, 50 bp, synthetic construct
  source 1..50: mol_type = other DNA
gcggatttatcggaaacgctgtaaaattacagcgcgagcgatcgcgtttt

SEQ ID NO: 67691 - DNA, 50 bp, synthetic construct
  source 1..50: mol_type = other DNA
agcaagctaataaaaaatagataggcctatctattttttatttatcttct

SEQ ID NO: 67692 - DNA, 50 bp, synthetic construct
  source 1..50: mol_type = other DNA
aaccaggaacatttgttccgtagtcgcaagcggaacacccgttccttgct

SEQ ID NO: 67693 - DNA, 50 bp, synthetic construct
  source 1..50: mol_type = other DNA
aaaaagcagtctggagtgtgtgctggagcagaccgttcagagctttttga

SEQ ID NO: 67694 - DNA, 50 bp, synthetic construct
  source 1..50: mol_type = other DNA
ttctaacttgtttaaaatgttatttacgattaaaaataatcaaaaaggaa

SEQ ID NO: 67695 - DNA, 50 bp, synthetic construct
  source 1..50: mol_type = other DNA
tccatctataagctcctttccgatatatttcaggaaacaggcaggatgct

SEQ ID NO: 67696 - DNA, 50 bp, synthetic construct
  source 1..50: mol_type = other DNA
cttattgtaagcttccatcttttcctttatccgtggtgacttttaataat

SEQ ID NO: 67697 - DNA, 50 bp, synthetic construct
  source 1..50: mol_type = other DNA
tataataaggatatatggtgatgaataaaagagttaagatttcggtctta

SEQ ID NO: 67698 - DNA, 50 bp, synthetic construct
  source 1..50: mol_type = other DNA
attgtgtgattggaagaaaatgattaaatcttctcttcgaatgagaccag

SEQ ID NO: 67699 - DNA, 50 bp, synthetic construct
  source 1..50: mol_type = other DNA
ctcaaaattgccttaaaaattgcgttggcaattattgcaagcattttttt

SEQ ID NO: 67700 - DNA, 50 bp, synthetic construct
  source 1..50: mol_type = other DNA
gtgaaattgggataatattctattggggtaaaaggttggcggctttttac

SEQ ID NO: 67701 - DNA, 50 bp, synthetic construct
  source 1..50: mol_type = other DNA
agacttggtgacggatattttcttgataaaaaatatgcaaaccgccgtga

SEQ ID NO: 67702 - DNA, 50 bp, synthetic construct
  source 1..50: mol_type = other DNA
ccaaaagaacccaagatcaggatttgcatcctggaacattttgatttttt

SEQ ID NO: 67703 - DNA, 50 bp, synthetic construct
  source 1..50: mol_type = other DNA
gaaatgaatcccacctccgccaagatttgcaacgattcccgcaccaatgt

SEQ ID NO: 67704 - DNA, 50 bp, synthetic construct
  source 1..50: mol_type = other DNA
tgcatgatatttatccccgatacccgtaaatttaatcgttattcaatttc

SEQ ID NO: 67705 - DNA, 50 bp, synthetic construct
  source 1..50: mol_type = other DNA
tctcctttcaaccaacaagaataccaaggagtctgttgacgcaatggaga

SEQ ID NO: 67706 - DNA, 50 bp, synthetic construct
  source 1..50: mol_type = other DNA
gcatgcgcagcagagccgcccgttcttccggctttatctcagccgcatcc

SEQ ID NO: 67707 - DNA, 50 bp, synthetic construct
  source 1..50: mol_type = other DNA
gcatcgaagacctccgggtttacccctgtggggcccgtgggccccgttgg

SEQ ID NO: 67708 - DNA, 50 bp, synthetic construct
  source 1..50: mol_type = other DNA
aaaagttcacgcctttttcaaaaagaagatggacaagatcgtgaacttcg

SEQ ID NO: 67709 - DNA, 50 bp, synthetic construct
  source 1..50: mol_type = other DNA
atgaagagccgccttcccaaggagcggtccttggcgaggcgcaggccttc

SEQ ID NO: 67710 - DNA, 50 bp, synthetic construct
  source 1..50: mol_type = other DNA
taatacaaaaatgttgtaattaaaatagatataataaaaattaaaccttc

SEQ ID NO: 67711 - DNA, 50 bp, synthetic construct
  source 1..50: mol_type = other DNA
cccctgccaaaaaggtcggttgcaaaaaaaacagccgcttgtttattaaa

SEQ ID NO: 67712 - DNA, 50 bp, synthetic construct
  source 1..50: mol_type = other DNA
ttgaagttgaagtatgaaaaaaggaagtattggtaatacttcagcatcaa

SEQ ID NO: 67713 - DNA, 50 bp, synthetic construct
  source 1..50: mol_type = other DNA
ctggaggtagtccaccagacagtggtctctgtatctgagactgtatctgt

SEQ ID NO: 67714 - DNA, 50 bp, synthetic construct
  source 1..50: mol_type = other DNA
agcctactgccgtgtttccacggatcaatggaagcgaaccgaagtactct

SEQ ID NO: 67715 - DNA, 50 bp, synthetic construct
  source 1..50: mol_type = other DNA
ttccgccgaccatcaatccgctgacgcagacggcggcacggtcggcgtta

SEQ ID NO: 67716 - DNA, 50 bp, synthetic construct
  source 1..50: mol_type = other DNA
tgtattaatttggcgtataaaaaatattttttgtgggaaatgtgaagttc

SEQ ID NO: 67717 - DNA, 50 bp, synthetic construct
  source 1..50: mol_type = other DNA
gtcagtgtcagaaaaatcctcagaaaggaatggtacttttggacacatac

SEQ ID NO: 67718 - DNA, 50 bp, synthetic construct
  source 1..50: mol_type = other DNA
gccggagaagaaaattcgtttagcagcataccctgatcgggattaccgat

SEQ ID NO: 67719 - DNA, 50 bp, synthetic construct
  source 1..50: mol_type = other DNA
ctgtgtaaaaggaagtgcatataggaatatggacaccgcctttatacggc

SEQ ID NO: 67720 - DNA, 50 bp, synthetic construct
  source 1..50: mol_type = other DNA
ctgactttccccgaacttgagagtgttattatagattcaggcaaaatatc

SEQ ID NO: 67721 - DNA, 50 bp, synthetic construct
  source 1..50: mol_type = other DNA
tatgcgcaacctcttttcaacacaacgctgttataaaaaatttgcctatt

SEQ ID NO: 67722 - DNA, 50 bp, synthetic construct
  source 1..50: mol_type = other DNA
gccgtcaccgtcctcaataatggagttgcagttgtcggcaaagtgcgcgc

SEQ ID NO: 67723 - DNA, 50 bp, synthetic construct
  source 1..50: mol_type = other DNA
tgtgtcaacggaccaggaagaccagctggtcacaccgatccttcattaca

SEQ ID NO: 67724 - DNA, 50 bp, synthetic construct
  source 1..50: mol_type = other DNA
ctgcagcatatcatcagtttcttcttccagaaacggatattatacatggt

SEQ ID NO: 67725 - DNA, 50 bp, synthetic construct
  source 1..50: mol_type = other DNA
gttccgaattgaccccggatcaagttcctgatctgtagaaaccctgcaat

SEQ ID NO: 67726 - DNA, 50 bp, synthetic construct
  source 1..50: mol_type = other DNA
tgccgcgttgtgacccgtccgtcccggatgcttctccgcactacgcatat

SEQ ID NO: 67727 - DNA, 50 bp, synthetic construct
  source 1..50: mol_type = other DNA
catgtgctcgctcatggctttacgccaacgcgccgatgacgatatagttc

SEQ ID NO: 67728 - DNA, 50 bp, synthetic construct
  source 1..50: mol_type = other DNA
ggataatcacagacttcttctttcacgaatgcagcaggcgttccgtttcc

SEQ ID NO: 67729 - DNA, 50 bp, synthetic construct
  source 1..50: mol_type = other DNA
cagattcttatccgtcattgccgtcactgctgccttcggcgtgaaatctc

SEQ ID NO: 67730 - DNA, 50 bp, synthetic construct
  source 1..50: mol_type = other DNA
ctttcttccggcggcggctttcatttctgacaaaggccgccgatcacacg

SEQ ID NO: 67731 - DNA, 50 bp, synthetic construct
  source 1..50: mol_type = other DNA
tacctctaaaagttgggcatatccagggccttgccttatgtatagattac

SEQ ID NO: 67732 - DNA, 50 bp, synthetic construct
  source 1..50: mol_type = other DNA
caacgccgattaacgagaagaaaaaattttcgtctcgtcaacgggctttg

SEQ ID NO: 67733 - DNA, 50 bp, synthetic construct
  source 1..50: mol_type = other DNA
gatatatcgcttaatgctgactgcgggaagttatgattcagaaatggagg

SEQ ID NO: 67734 - DNA, 50 bp, synthetic construct
  source 1..50: mol_type = other DNA
cagcaatggcgtactgagcaaaatttaacttgctttgtccggacttcaga

SEQ ID NO: 67735 - DNA, 50 bp, synthetic construct
  source 1..50: mol_type = other DNA
cttccatatcaaaaaagccctccatatggaggatgggaagttctacgact

SEQ ID NO: 67736 - DNA, 50 bp, synthetic construct
  source 1..50: mol_type = other DNA
tatatttcatgtgttcgatcatcggaagacattcgttgattatgagatcg

SEQ ID NO: 67737 - DNA, 50 bp, synthetic construct
  source 1..50: mol_type = other DNA
gggcgcttcaaagatgaaaacgaggtatctttctcatagttgatccgccc

SEQ ID NO: 67738 - DNA, 50 bp, synthetic construct
  source 1..50: mol_type = other DNA
tgggacgccagaaagccgctgcaagcttgcattttgaaaagccctctgct

SEQ ID NO: 67739 - DNA, 50 bp, synthetic construct
  source 1..50: mol_type = other DNA
agcttctatcgttcctaaagtataattatgctttcaacctgaaagaaggt

SEQ ID NO: 67740 - DNA, 50 bp, synthetic construct
  source 1..50: mol_type = other DNA
gcgcttgcctgctgcgcagccaaagtttttaccgcttgaaaggtggtata

SEQ ID NO: 67741 - DNA, 50 bp, synthetic construct
  source 1..50: mol_type = other DNA
actgaaaaatgacagataaaaagagataattccattttacgctttccagt

SEQ ID NO: 67742 - DNA, 50 bp, synthetic construct
  source 1..50: mol_type = other DNA
cgtcgtctttgcgcaactcctgcgcctcaagcagggttacaacggcgacc

SEQ ID NO: 67743 - DNA, 50 bp, synthetic construct
  source 1..50: mol_type = other DNA
atcaaatacggtaacgtagatatcttctaatccaagttaaaatagccaat

SEQ ID NO: 67744 - DNA, 50 bp, synthetic construct
  source 1..50: mol_type = other DNA
ctgcgttaccgggttatcgaaatgtttctttggggtacagggtaaaatcc

SEQ ID NO: 67745 - DNA, 50 bp, synthetic construct
  source 1..50: mol_type = other DNA
tgtcagcgacataatggaaatggtcgattaccgcgataccgttttcaatc

SEQ ID NO: 67746 - DNA, 50 bp, synthetic construct
  source 1..50: mol_type = other DNA
aatataaaagcacaaaaaaactactccaaggatttagctgtattcatatt

SEQ ID NO: 67747 - DNA, 50 bp, synthetic construct
  source 1..50: mol_type = other DNA
acaaagactgcatagaagacctccggggcgcctcccgccgcaggctgctg

SEQ ID NO: 67748 - DNA, 50 bp, synthetic construct
  source 1..50: mol_type = other DNA
tataagtatttcagcgatgtcataaataataggcagcagaaagactgata

SEQ ID NO: 67749 - DNA, 50 bp, synthetic construct
  source 1..50: mol_type = other DNA
atgtccttgcccagcggtagatcgtccgataagccgccaggaaaggaaaa

SEQ ID NO: 67750 - DNA, 50 bp, synthetic construct
  source 1..50: mol_type = other DNA
agaattataccttatttttgtataaaaatacaaaaatattaatttcacta

SEQ ID NO: 67751 - DNA, 50 bp, synthetic construct
  source 1..50: mol_type = other DNA
cgttggcgaagtcgccaagctcatcaacatgaagtacgagatcgccaacg

SEQ ID NO: 67752 - DNA, 50 bp, synthetic construct
  source 1..50: mol_type = other DNA
agactcatagtgctgtgtaaagatcaaaattccgacctgttttgggcggt

SEQ ID NO: 67753 - DNA, 50 bp, synthetic construct
  source 1..50: mol_type = other DNA
atccgggaaaggccgcgctctgcggccgcagaaaggaggcttgccaaatg

SEQ ID NO: 67754 - DNA, 50 bp, synthetic construct
  source 1..50: mol_type = other DNA
tggccgcacctgttttccggcctgctcacccctgccagcatatgtgcggt

SEQ ID NO: 67755 - DNA, 50 bp, synthetic construct
  source 1..50: mol_type = other DNA
gtatcgttctgcccgttgtccgacgcttcggtaggcggctgcggcaacgg

SEQ ID NO: 67756 - DNA, 50 bp, synthetic construct
  source 1..50: mol_type = other DNA
cttctgcaaaccagaagtgtgtcggacaagcagagaggttttttaagaca

SEQ ID NO: 67757 - DNA, 50 bp, synthetic construct
  source 1..50: mol_type = other DNA
tggggactcacattgatggaggagagcggcttcatcttcgttaatcacag

SEQ ID NO: 67758 - DNA, 50 bp, synthetic construct
  source 1..50: mol_type = other DNA
ttgctcgtacataaaaattatatgacaagaaaatctaaaaatatgagcaa

SEQ ID NO: 67759 - DNA, 50 bp, synthetic construct
  source 1..50: mol_type = other DNA
tgaaggcgaccggatcctccgccgagaggtcgagggttcgaatcccttca

SEQ ID NO: 67760 - DNA, 50 bp, synthetic construct
  source 1..50: mol_type = other DNA
tcaaaccgagcggcgcagggatgcctcgatcggcgcgagattgactttta

SEQ ID NO: 67761 - DNA, 50 bp, synthetic construct
  source 1..50: mol_type = other DNA
aatacggcggaagatttttgatttctaaagcaaaattccgcgatatcttc

SEQ ID NO: 67762 - DNA, 50 bp, synthetic construct
  source 1..50: mol_type = other DNA
tgaaactcttgcagagcttgctgccgggagcgttcaacgcatattttccg

SEQ ID NO: 67763 - DNA, 50 bp, synthetic construct
  source 1..50: mol_type = other DNA
ccctgctcggcataatcgtgagcctccgcgctggacatcgccgcgcaggt

SEQ ID NO: 67764 - DNA, 50 bp, synthetic construct
  source 1..50: mol_type = other DNA
gctgctccgcagatctccacggagtttctatctgagaatatctgagcaaa

SEQ ID NO: 67765 - DNA, 50 bp, synthetic construct
  source 1..50: mol_type = other DNA
atcggcgccgtttcatcaagacaaatttgaaaatgataacaaatgccgtt

SEQ ID NO: 67766 - DNA, 50 bp, synthetic construct
  source 1..50: mol_type = other DNA
ctgccccttgcttttgttttattaacaaataaaatacatgcaattacaac

SEQ ID NO: 67767 - DNA, 50 bp, synthetic construct
  source 1..50: mol_type = other DNA
ttgcgttatctgttccgattatgatatgaaaaagcgaacgatcaacattt

SEQ ID NO: 67768 - DNA, 50 bp, synthetic construct
  source 1..50: mol_type = other DNA
ccatgcggcgctgatagctcatacgtgtatgatctggtagccatacaata

SEQ ID NO: 67769 - DNA, 50 bp, synthetic construct
  source 1..50: mol_type = other DNA
cagtccaattccttttccgcaaacttctgagcggactgtccgctggatgg

SEQ ID NO: 67770 - DNA, 50 bp, synthetic construct
  source 1..50: mol_type = other DNA
aaaaatacctctatttccaaataattgaatacgtcaatataatgtgttat

SEQ ID NO: 67771 - DNA, 50 bp, synthetic construct
  source 1..50: mol_type = other DNA
cattattgactctcgctttctatgagcaaagaaaaaaagagtagcaaaaa

SEQ ID NO: 67772 - DNA, 50 bp, synthetic construct
  source 1..50: mol_type = other DNA
agtgaataagtacggtgtatttcaattccgcatggctataccccttaacg

SEQ ID NO: 67773 - DNA, 50 bp, synthetic construct
  source 1..50: mol_type = other DNA
taaaatttattcgtagagtttacagccatccaggccatgaatcagcttcg

SEQ ID NO: 67774 - DNA, 50 bp, synthetic construct
  source 1..50: mol_type = other DNA
attatatatataaagaagataatttaaatgggcttgaaactatgattaaa

SEQ ID NO: 67775 - DNA, 50 bp, synthetic construct
  source 1..50: mol_type = other DNA
gcgatctaactcatcggaaaacaggctggtttgaggatgtaaagttcctt

SEQ ID NO: 67776 - DNA, 50 bp, synthetic construct
  source 1..50: mol_type = other DNA
aagaaattcgcgtcgcagctgccgattgactgcagcgtggcgagcatgta

SEQ ID NO: 67777 - DNA, 50 bp, synthetic construct
  source 1..50: mol_type = other DNA
tgcctcaaatgcctttttcagcacattgtttgcaaccgtcccttgtgtca

SEQ ID NO: 67778 - DNA, 50 bp, synthetic construct
  source 1..50: mol_type = other DNA
tgcatcttctacgagcgaaagaactcgctcctttcttcgtagatcacgag

SEQ ID NO: 67779 - DNA, 50 bp, synthetic construct
  source 1..50: mol_type = other DNA
caaaagcgcaagggcgtagagaagatcttgtccgcatccttgcgatatct

SEQ ID NO: 67780 - DNA, 50 bp, synthetic construct
  source 1..50: mol_type = other DNA
aaaagctagttttattatctttaaaattaaatataatggaggtgatcttt

SEQ ID NO: 67781 - DNA, 50 bp, synthetic construct
  source 1..50: mol_type = other DNA
atggtaaggcttcctacttcataggcctcaaaactatgaagctgatcttc

SEQ ID NO: 67782 - DNA, 50 bp, synthetic construct
  source 1..50: mol_type = other DNA
ttttagtgcaccccggaagtattttgtaaggaatgagatatctgtgaaag

SEQ ID NO: 67783 - DNA, 50 bp, synthetic construct
  source 1..50: mol_type = other DNA
ttagttttcataagcaacattgcaaaatgtttgcaccttatgaacaatac

SEQ ID NO: 67784 - DNA, 50 bp, synthetic construct
  source 1..50: mol_type = other DNA
acaaagcaaaaacctacgacggcgcatgcgccgccgtttttttgtttttc

SEQ ID NO: 67785 - DNA, 50 bp, synthetic construct
  source 1..50: mol_type = other DNA
tttccaaggtggctgtacaaaaacggctttatgatgaggaaccttggaaa

SEQ ID NO: 67786 - DNA, 50 bp, synthetic construct
  source 1..50: mol_type = other DNA
gcgtccatgccaagaccgccacggtgccgtggcgaccattatggcactcg

SEQ ID NO: 67787 - DNA, 50 bp, synthetic construct
  source 1..50: mol_type = other DNA
aatatccaacatcaatgtgccaattcattggtacataaatgttggaaatt

SEQ ID NO: 67788 - DNA, 50 bp, synthetic construct
  source 1..50: mol_type = other DNA
tgacgcggaaggaatttgccaggtatcccttggaaagccaaccatgaaaa

SEQ ID NO: 67789 - DNA, 50 bp, synthetic construct
  source 1..50: mol_type = other DNA
acagaatattgttgataaaacgttaattatttttatccatttatttctgt

SEQ ID NO: 67790 - DNA, 50 bp, synthetic construct
  source 1..50: mol_type = other DNA
tttcaaagaataaatgactaacttttcatttagtaatttatgtttaaaat

SEQ ID NO: 67791 - DNA, 50 bp, synthetic construct
  source 1..50: mol_type = other DNA
gctccatttgctttctcagcgggaagttggtctttcaacgccgggatgat

SEQ ID NO: 67792 - DNA, 50 bp, synthetic construct
  source 1..50: mol_type = other DNA
tacgaggcgcaggtggactattacactggggagtcccccagcgcagaaaa

SEQ ID NO: 67793 - DNA, 50 bp, synthetic construct
  source 1..50: mol_type = other DNA
aaaccatacttggcgataaaatccccgctttgaatcgccgaaatcgctgg

SEQ ID NO: 67794 - DNA, 50 bp, synthetic construct
  source 1..50: mol_type = other DNA
atgagattacggtttgaccgcagaattcatgtgaaaaactgttttcttat

SEQ ID NO: 67795 - DNA, 50 bp, synthetic construct
  source 1..50: mol_type = other DNA
atcattatcgggttggccgtggtctcccaattagcaaaaggaataaaact

SEQ ID NO: 67796 - DNA, 50 bp, synthetic construct
  source 1..50: mol_type = other DNA
atcgtctgggcggctttgagctgcgcgtagtagctgttggcggggacgtc

SEQ ID NO: 67797 - DNA, 50 bp, synthetic construct
  source 1..50: mol_type = other DNA
agggcgacgagccttgtgggaatttttttgcccagaagcgccttcatggc

SEQ ID NO: 67798 - DNA, 50 bp, synthetic construct
  source 1..50: mol_type = other DNA
agaatcttgttatgtcaagaataaatttaggcttgacaaacgacgcggta

SEQ ID NO: 67799 - DNA, 50 bp, synthetic construct
  source 1..50: mol_type = other DNA
aaaaatcaatttttaatatataaaattttgtgtttcgaaggttgacaaat

SEQ ID NO: 67800 - DNA, 50 bp, synthetic construct
  source 1..50: mol_type = other DNA
tgcgtttttcatgcgcgtaggttctcctttctgcaagccagcaagctgct

SEQ ID NO: 67801 - DNA, 50 bp, synthetic construct
  source 1..50: mol_type = other DNA
aacagaaaaagcccctattcggggctcaatcgtggagaactttttctttg

SEQ ID NO: 67802 - DNA, 50 bp, synthetic construct
  source 1..50: mol_type = other DNA
ggtggagctgaggggagtcgaaccccggttcaaatccggtcagttgctcc

SEQ ID NO: 67803 - DNA, 50 bp, synthetic construct
  source 1..50: mol_type = other DNA
gtttttcttcataattcctccatcaagatggaacaattcctgctaaaagt

SEQ ID NO: 67804 - DNA, 50 bp, synthetic construct
  source 1..50: mol_type = other DNA
cagattgcccctatgtgcgacgatatatgatcccggcggtaagcgctttt

SEQ ID NO: 67805 - DNA, 50 bp, synthetic construct
  source 1..50: mol_type = other DNA
ctaccgacattagggaaaaaggtgtttcccggtttcccgccttcgcgtat

SEQ ID NO: 67806 - DNA, 50 bp, synthetic construct
  source 1..50: mol_type = other DNA
gacagaatctccaacgtcaatggtctcctctttacaaattgcccgttatt

SEQ ID NO: 67807 - DNA, 50 bp, synthetic construct
  source 1..50: mol_type = other DNA
aaagtcgctcattttcgggaagctgtttaacatgggctttaactacggtt

SEQ ID NO: 67808 - DNA, 50 bp, synthetic construct
  source 1..50: mol_type = other DNA
acgagaccatgctggacgtggtgggcccagcactaaaataatggtacagt

SEQ ID NO: 67809 - DNA, 50 bp, synthetic construct
  source 1..50: mol_type = other DNA
catctgccggcgccgctctggcgtatactcgtcctggtcgagggcaacac

SEQ ID NO: 67810 - DNA, 50 bp, synthetic construct
  source 1..50: mol_type = other DNA
ccccttcccgcccatcctttcccagcagcgacgcgaggcgcgtagcgcgg

SEQ ID NO: 67811 - DNA, 50 bp, synthetic construct
  source 1..50: mol_type = other DNA
cttacagcctgaggtcattcagcgtatgctggcctaccacaatgagtttg

SEQ ID NO: 67812 - DNA, 50 bp, synthetic construct
  source 1..50: mol_type = other DNA
ctgggagcggtggcaagaattaagacctcgattctgtataccggggcgta

SEQ ID NO: 67813 - DNA, 50 bp, synthetic construct
  source 1..50: mol_type = other DNA
cggaaactgctttacggataccagatcgggtgtacccaaccctgcttgaa

SEQ ID NO: 67814 - DNA, 50 bp, synthetic construct
  source 1..50: mol_type = other DNA
ggagacaaatagaatggaactttacagctcattcaattccttttgtatca

SEQ ID NO: 67815 - DNA, 50 bp, synthetic construct
  source 1..50: mol_type = other DNA
agctgtcacctctcgtgtgtccaaatacatgctgaaatcgggagaaagca

SEQ ID NO: 67816 - DNA, 50 bp, synthetic construct
  source 1..50: mol_type = other DNA
tatatcactctgaaagccaataatagatttatgcagttcagttttgtatc

SEQ ID NO: 67817 - DNA, 50 bp, synthetic construct
  source 1..50: mol_type = other DNA
gtcctctcctttcgtcagattttccttctaatccgcactggcaccggggg

SEQ ID NO: 67818 - DNA, 50 bp, synthetic construct
  source 1..50: mol_type = other DNA
atagacgctgattcttcaatgctgatggtcaggagggttcgtgcgtctat

SEQ ID NO: 67819 - DNA, 50 bp, synthetic construct
  source 1..50: mol_type = other DNA
cggttgcccatatgcagggagtgtgatcaccaccggcgctacggctgccg

SEQ ID NO: 67820 - DNA, 50 bp, synthetic construct
  source 1..50: mol_type = other DNA
gctttttcgggggccgtcgatgcatttgcaccttttcaaatgggttccaa

SEQ ID NO: 67821 - DNA, 50 bp, synthetic construct
  source 1..50: mol_type = other DNA
ttttacagaccttccagcagaccttattttctgctgaaaagcctttcttt

SEQ ID NO: 67822 - DNA, 50 bp, synthetic construct
  source 1..50: mol_type = other DNA
gggaatttctttctctgcgggcttggcaggccgcagaaaggaggcttgcc

SEQ ID NO: 67823 - DNA, 50 bp, synthetic construct
  source 1..50: mol_type = other DNA
tgtatgaggcgagggtggtaaagtaatcttccacatctatgactgtgcca

SEQ ID NO: 67824 - DNA, 50 bp, synthetic construct
  source 1..50: mol_type = other DNA
tggcaaaccacattatactgataactctttcagccatgcctcaaatgctt

SEQ ID NO: 67825 - DNA, 50 bp, synthetic construct
  source 1..50: mol_type = other DNA
aaaaaattttcacgcttataacagctgctcactattattgaatatttatt

SEQ ID NO: 67826 - DNA, 50 bp, synthetic construct
  source 1..50: mol_type = other DNA
atccgcagacagaagccagtgctttaaatccaatatcggcttctccggaa

SEQ ID NO: 67827 - DNA, 50 bp, synthetic construct
  source 1..50: mol_type = other DNA
taataaataaatcataaaaatatatctatattcaatggattgcgctattg

SEQ ID NO: 67828 - DNA, 50 bp, synthetic construct
  source 1..50: mol_type = other DNA
cgaaaaagagtaccgagatgcgtgcaaaaccggtgacccacgctcaatcg

SEQ ID NO: 67829 - DNA, 50 bp, synthetic construct
  source 1..50: mol_type = other DNA
ttgtttccatcgtccacctcgccgacggttaccgtggaaaatcctcggac

SEQ ID NO: 67830 - DNA, 50 bp, synthetic construct
  source 1..50: mol_type = other DNA
aactttttttactttcttctcgccattttatgcggattatcaacaaaatt

SEQ ID NO: 67831 - DNA, 50 bp, synthetic construct
  source 1..50: mol_type = other DNA
gattaatcatcccaaaacattccactgcgaatgttttcttgaagctccgc

SEQ ID NO: 67832 - DNA, 50 bp, synthetic construct
  source 1..50: mol_type = other DNA
gcacggctatggattccactgggcaatgcttggagcagacatagcggtaa

SEQ ID NO: 67833 - DNA, 50 bp, synthetic construct
  source 1..50: mol_type = other DNA
cacatcaccgcggtcccacgcgacctgttgccgacgtgcgcggacatatc

SEQ ID NO: 67834 - DNA, 50 bp, synthetic construct
  source 1..50: mol_type = other DNA
ttgcgccagttttgcttgcgtccaccgcttttcataccaaacgcgcacaa

SEQ ID NO: 67835 - DNA, 50 bp, synthetic construct
  source 1..50: mol_type = other DNA
taaattataacgcgctttattcatttatgaattaaattttttttaaatta

SEQ ID NO: 67836 - DNA, 50 bp, synthetic construct
  source 1..50: mol_type = other DNA
aataagtcaagctgcccgttctgcggacagaatattgtcggggattttat

SEQ ID NO: 67837 - DNA, 50 bp, synthetic construct
  source 1..50: mol_type = other DNA
agccaaccacctcacccggatgattgcccgcttctgggatgtggacagcg

SEQ ID NO: 67838 - DNA, 50 bp, synthetic construct
  source 1..50: mol_type = other DNA
ctcaggcaatgaccgacaatgtgccatcacacacgcaataaccgcaatta

SEQ ID NO: 67839 - DNA, 50 bp, synthetic construct
  source 1..50: mol_type = other DNA
ccaaattcgctgttgtgaaaatcaattattttctcaaagcagcaattttt

SEQ ID NO: 67840 - DNA, 50 bp, synthetic construct
  source 1..50: mol_type = other DNA
aatccgttttttatatcggaaagcatgtccaccaactcgtaatcaggatt

SEQ ID NO: 67841 - DNA, 50 bp, synthetic construct
  source 1..50: mol_type = other DNA
catcgtaccacctccataattttatataacctgtttattctggcattgta

SEQ ID NO: 67842 - DNA, 50 bp, synthetic construct
  source 1..50: mol_type = other DNA
tacaatctgcgatacctttcacctttattaaattacacaacttttttgca

SEQ ID NO: 67843 - DNA, 50 bp, synthetic construct
  source 1..50: mol_type = other DNA
tcggttctgcttgtcccatacctgatcaattatgggaaaggcattactct

SEQ ID NO: 67844 - DNA, 50 bp, synthetic construct
  source 1..50: mol_type = other DNA
ttctcataaaaaatatggtcgattccgcaagggtttattttttatactct

SEQ ID NO: 67845 - DNA, 50 bp, synthetic construct
  source 1..50: mol_type = other DNA
attttcttatatttgcaggcaaatatataatcctgctattaatagaaaag

SEQ ID NO: 67846 - DNA, 50 bp, synthetic construct
  source 1..50: mol_type = other DNA
tgtagatcgcgccgtggctcacgtccgctacggccacgcggcgatcggct

SEQ ID NO: 67847 - DNA, 50 bp, synthetic construct
  source 1..50: mol_type = other DNA
gagaagggatgaaatcataactgtgcccatttaatcgcccatcctttctg

SEQ ID NO: 67848 - DNA, 50 bp, synthetic construct
  source 1..50: mol_type = other DNA
caagacatccaacaaagggaaaacattttttcgcctttttgggggtagta

SEQ ID NO: 67849 - DNA, 50 bp, synthetic construct
  source 1..50: mol_type = other DNA
ttgctgttattcgccttttggcacgacatagaaaaggaaagaaacctcag

SEQ ID NO: 67850 - DNA, 50 bp, synthetic construct
  source 1..50: mol_type = other DNA
ataaaatggggcaagcgaagaaggtaccttcctgttttcgttcaatttat

SEQ ID NO: 67851 - DNA, 50 bp, synthetic construct
  source 1..50: mol_type = other DNA
aggttgacggcaatgacgaataagaatgtcttcgatattgcaatcaaggg

SEQ ID NO: 67852 - DNA, 50 bp, synthetic construct
  source 1..50: mol_type = other DNA
tgctacttgtaacataaaaactcctcagagttttctctgtatgataactc

SEQ ID NO: 67853 - DNA, 50 bp, synthetic construct
  source 1..50: mol_type = other DNA
tctttgcttcacgccatgtcggataatactaacagactaattcgcaagca

SEQ ID NO: 67854 - DNA, 50 bp, synthetic construct
  source 1..50: mol_type = other DNA
cgtggatgacaccatgctggacgatatcgtcgatgcggacatgcagcagc

SEQ ID NO: 67855 - DNA, 50 bp, synthetic construct
  source 1..50: mol_type = other DNA
gaagcgaaaacggcggagggggaacgcaccgcctccatcgtggcgacgtg

SEQ ID NO: 67856 - DNA, 50 bp, synthetic construct
  source 1..50: mol_type = other DNA
acattcagtggtaataaggtagacatagctacctctttccgataaaagtg

SEQ ID NO: 67857 - DNA, 50 bp, synthetic construct
  source 1..50: mol_type = other DNA
ttatcacatacaacatacccgaaaggcaggtacagcgttgtctgcacgcg

SEQ ID NO: 67858 - DNA, 50 bp, synthetic construct
  source 1..50: mol_type = other DNA
tatagataatgtaatttccataattaacactggatatatcaaggactatg

SEQ ID NO: 67859 - DNA, 50 bp, synthetic construct
  source 1..50: mol_type = other DNA
tcctgccagtttatggtaagaataaaatcccttaggaactaagggcgcac

SEQ ID NO: 67860 - DNA, 50 bp, synthetic construct
  source 1..50: mol_type = other DNA
tggccaaagtcgtaaccacgataccggcgtcgttttatgtgcttcaacgt

SEQ ID NO: 67861 - DNA, 50 bp, synthetic construct
  source 1..50: mol_type = other DNA
ctgtcatgcgttcaatttcctcacgagtgagagaattaagaaaataagga

SEQ ID NO: 67862 - DNA, 50 bp, synthetic construct
  source 1..50: mol_type = other DNA
ttttatcaaatagctctcccacttcataaagattcatctaatcaataaat

SEQ ID NO: 67863 - DNA, 50 bp, synthetic construct
  source 1..50: mol_type = other DNA
aaacaggacctgtgcacgggtatgtgcatacccggcgacccttctctttt

SEQ ID NO: 67864 - DNA, 50 bp, synthetic construct
  source 1..50: mol_type = other DNA
caatccattccacctgttcccgaaattttttataaagctataattgatta

SEQ ID NO: 67865 - DNA, 50 bp, synthetic construct
  source 1..50: mol_type = other DNA
tattataagttatcgagaaacagaccaccatactgcaataacttataata

SEQ ID NO: 67866 - DNA, 50 bp, synthetic construct
  source 1..50: mol_type = other DNA
attgcgtggcaggtgctggatgtgcatccatcctcaacgcgcgcctcaat

SEQ ID NO: 67867 - DNA, 50 bp, synthetic construct
  source 1..50: mol_type = other DNA
gatagtctgatgcaaaattcgcgcttttgcgatatttgtatgtagaaaaa

SEQ ID NO: 67868 - DNA, 50 bp, synthetic construct
  source 1..50: mol_type = other DNA
tcgtttctttttgttttgtatgtttaaacatggaatctaaaaaagaaaga

SEQ ID NO: 67869 - DNA, 50 bp, synthetic construct
  source 1..50: mol_type = other DNA
tcttgattggtacggtcttttcggtcttaaaaactggacaccaatcaaga

SEQ ID NO: 67870 - DNA, 50 bp, synthetic construct
  source 1..50: mol_type = other DNA
tccggcggcggctttcatttcatctggtgtgatatttcgccgccgtttca

SEQ ID NO: 67871 - DNA, 50 bp, synthetic construct
  source 1..50: mol_type = other DNA
aaaaataagcctcccgccgttaaagcgttgacttcgtggcttcgattttt

SEQ ID NO: 67872 - DNA, 50 bp, synthetic construct
  source 1..50: mol_type = other DNA
attgagatttgccagaaaattatgtagctatttggatgcagttgtggtag

SEQ ID NO: 67873 - DNA, 50 bp, synthetic construct
  source 1..50: mol_type = other DNA
tactgaaagaaggtggaaagatgatttattattttcacgcaaattcttga

SEQ ID NO: 67874 - DNA, 50 bp, synthetic construct
  source 1..50: mol_type = other DNA
tgatggttcataagcaaatcgagagaaatacaggttcttctgatccatct

SEQ ID NO: 67875 - DNA, 50 bp, synthetic construct
  source 1..50: mol_type = other DNA
cagcgatcatgcagtcgaaaaggcggcgattttacagagcaagatcgcgg

SEQ ID NO: 67876 - DNA, 50 bp, synthetic construct
  source 1..50: mol_type = other DNA
aaaaatacttttagtagttgttataatcaagggataaaaacagaacattt

SEQ ID NO: 67877 - DNA, 50 bp, synthetic construct
  source 1..50: mol_type = other DNA
gaaaagagctcagtgtaggtgtctccttacagcgtccatctgctcttgtt

SEQ ID NO: 67878 - DNA, 50 bp, synthetic construct
  source 1..50: mol_type = other DNA
cctttggtctcatgctcttttttctccggatttgagccgaaactccagct

SEQ ID NO: 67879 - DNA, 50 bp, synthetic construct
  source 1..50: mol_type = other DNA
ttacaatttcggtcaaagactatgaactcttgtttttgcaggtattgttt

SEQ ID NO: 67880 - DNA, 50 bp, synthetic construct
  source 1..50: mol_type = other DNA
tacagcacacgggccaccgacacagctgtcgggcatcacaatgtccttga

SEQ ID NO: 67881 - DNA, 50 bp, synthetic construct
  source 1..50: mol_type = other DNA
ataaattgcaataaaaatttataaaatgagcatacaaaattaaaacggtc

SEQ ID NO: 67882 - DNA, 50 bp, synthetic construct
  source 1..50: mol_type = other DNA
gcggcctttcttttgcgctcttgaggacaaggtctggaatgaacagcatt

SEQ ID NO: 67883 - DNA, 50 bp, synthetic construct
  source 1..50: mol_type = other DNA
gcgtcgaaaatcccttcgtcgaaaagtttataccgcgggattgacttgat

SEQ ID NO: 67884 - DNA, 50 bp, synthetic construct
  source 1..50: mol_type = other DNA
ttaaagtgctgtgtaaaataattatttatatgttttaattatttgcaaaa

SEQ ID NO: 67885 - DNA, 50 bp, synthetic construct
  source 1..50: mol_type = other DNA
gaagggtcaagttttaatgccttctgcatttggttcatcaatgaccgctt

SEQ ID NO: 67886 - DNA, 50 bp, synthetic construct
  source 1..50: mol_type = other DNA
ttttgaaaaaaaatgatattaaaatatttaataatcatttgcattcatct

SEQ ID NO: 67887 - DNA, 50 bp, synthetic construct
  source 1..50: mol_type = other DNA
gacattattcactttattttgtgaattcacaaatataaatttctagagat

SEQ ID NO: 67888 - DNA, 50 bp, synthetic construct
  source 1..50: mol_type = other DNA
tgacgcattgctgaatgatgcttctgttggggtcagcggttcgaatccgc

SEQ ID NO: 67889 - DNA, 50 bp, synthetic construct
  source 1..50: mol_type = other DNA
ccccctatttaacgaaaacggcatcggatttgtttttgttttagaggatg

SEQ ID NO: 67890 - DNA, 50 bp, synthetic construct
  source 1..50: mol_type = other DNA
gacaaaggaggccgaaatgatataattatactgaatttcaatgtagtcat

SEQ ID NO: 67891 - DNA, 50 bp, synthetic construct
  source 1..50: mol_type = other DNA
aaaaaacattttccgggataatagacgatttcctgttcaaaatgaggttg

SEQ ID NO: 67892 - DNA, 50 bp, synthetic construct
  source 1..50: mol_type = other DNA
tttttgattatttttaatcgtaattcattaatattaaaaactctttttct

SEQ ID NO: 67893 - DNA, 50 bp, synthetic construct
  source 1..50: mol_type = other DNA
ttggggactaactgccctattactacagaaaacgggtaattagtccctaa

SEQ ID NO: 67894 - DNA, 50 bp, synthetic construct
  source 1..50: mol_type = other DNA
ataaaaaatcccacctacgacttctcaatgacggcagtaccgttttctat

SEQ ID NO: 67895 - DNA, 50 bp, synthetic construct
  source 1..50: mol_type = other DNA
ttttacctgaacatatacagttttataacggactttacttcattgaaaag

SEQ ID NO: 67896 - DNA, 50 bp, synthetic construct
  source 1..50: mol_type = other DNA
cgtaaaaaataacagagattttcatataacaatcacaaaaaaataatatg

SEQ ID NO: 67897 - DNA, 50 bp, synthetic construct
  source 1..50: mol_type = other DNA
ttatcatcctttctctgaatataaatgaaccggcagaaacagaataaaaa

SEQ ID NO: 67898 - DNA, 50 bp, synthetic construct
  source 1..50: mol_type = other DNA
cgatacctttcacctttctttccttggcagaataacggttccaactttca

SEQ ID NO: 67899 - DNA, 50 bp, synthetic construct
  source 1..50: mol_type = other DNA
agttcgatatatatctttttggtacaaacaaaaaactaggatttcgaagg

SEQ ID NO: 67900 - DNA, 50 bp, synthetic construct
  source 1..50: mol_type = other DNA
tgtttctttacctgattttctattcttaccataaactggcaggaacaacg

SEQ ID NO: 67901 - DNA, 50 bp, synthetic construct
  source 1..50: mol_type = other DNA
ttcactccctgtcagcaacatacacttgtctgttgctttcactgcatttt

SEQ ID NO: 67902 - DNA, 50 bp, synthetic construct
  source 1..50: mol_type = other DNA
atttaatattattgcaatcaagactaatcttaaatgaattaatatgataa

SEQ ID NO: 67903 - DNA, 50 bp, synthetic construct
  source 1..50: mol_type = other DNA
gaattatcagaataagccaattgaaacaaatttttgcaacttgaaaatta

SEQ ID NO: 67904 - DNA, 50 bp, synthetic construct
  source 1..50: mol_type = other DNA
atcagcaaaattaattcttaattaggagatacaaaatcaaaaatgctaaa

SEQ ID NO: 67905 - DNA, 50 bp, synthetic construct
  source 1..50: mol_type = other DNA
cgatatgattgagcaggaagcagaggaaggcgttaaggagaaggcaaccg

SEQ ID NO: 67906 - DNA, 50 bp, synthetic construct
  source 1..50: mol_type = other DNA
attctccttcctttttggtagtcctactgctaccaaatttggtaatatat

SEQ ID NO: 67907 - DNA, 50 bp, synthetic construct
  source 1..50: mol_type = other DNA
tatcgtgccgatagataccgtcagctccctcacgatgcttttcctaaata

SEQ ID NO: 67908 - DNA, 50 bp, synthetic construct
  source 1..50: mol_type = other DNA
atggaaaaaagcattaatgatgaaattatatcatactccgattttcttca

SEQ ID NO: 67909 - DNA, 50 bp, synthetic construct
  source 1..50: mol_type = other DNA
ttcaatggggaaagaaaatctaaaaacggctgatggttgccggaatagcc

SEQ ID NO: 67910 - DNA, 50 bp, synthetic construct
  source 1..50: mol_type = other DNA
cacatcaaaacggtaaatgccattgtcatgaatgttgccatttctgaaaa

SEQ ID NO: 67911 - DNA, 50 bp, synthetic construct
  source 1..50: mol_type = other DNA
cgggtacaggaaacagatgaacggtgggctgtatcagtttttctcaactt

SEQ ID NO: 67912 - DNA, 50 bp, synthetic construct
  source 1..50: mol_type = other DNA
cgtgcttcggcggtgacgatctcgtgcaggatttccagacagcgggcact

SEQ ID NO: 67913 - DNA, 50 bp, synthetic construct
  source 1..50: mol_type = other DNA
cagctttcggagcgtgagcggtctttcgaaacggcggagctggaattctc

SEQ ID NO: 67914 - DNA, 50 bp, synthetic construct
  source 1..50: mol_type = other DNA
tcataatggtggggttccggtctcatcggtgttgtactgttccattgtgt

SEQ ID NO: 67915 - DNA, 50 bp, synthetic construct
  source 1..50: mol_type = other DNA
tcaacaccccgcggggaaccgcagggcttcgccgaaacgctggaagtgca

SEQ ID NO: 67916 - DNA, 50 bp, synthetic construct
  source 1..50: mol_type = other DNA
ttttgcatgatgaagccctccccttaagggattttactcgcaaagcaaaa

SEQ ID NO: 67917 - DNA, 50 bp, synthetic construct
  source 1..50: mol_type = other DNA
aaaccgggaggggctttattcattgtaagcaaaataagccgccccgcaaa

SEQ ID NO: 67918 - DNA, 50 bp, synthetic construct
  source 1..50: mol_type = other DNA
ataaaggacttgcacgttactttgtaaaaagtactttttaaataatttaa

SEQ ID NO: 67919 - DNA, 50 bp, synthetic construct
  source 1..50: mol_type = other DNA
gccgccaggctgaccgccgacggcatataattggctttcagagtgatata

SEQ ID NO: 67920 - DNA, 50 bp, synthetic construct
  source 1..50: mol_type = other DNA
agcataagcagaaaatctcctcattgttgatgaatgccgcaacttggcgg

SEQ ID NO: 67921 - DNA, 50 bp, synthetic construct
  source 1..50: mol_type = other DNA
gtaccaatgaagaaaaggcttgtttgaggaagctctttcccatatgccgc

SEQ ID NO: 67922 - DNA, 50 bp, synthetic construct
  source 1..50: mol_type = other DNA
ctgaatctccaagctctgccactcctaaaccggccatccgtgagcttcag

SEQ ID NO: 67923 - DNA, 50 bp, synthetic construct
  source 1..50: mol_type = other DNA
caaataagtcaagctgcccgttctgaaaaagggcgaggagaattattttt

SEQ ID NO: 67924 - DNA, 50 bp, synthetic construct
  source 1..50: mol_type = other DNA
ataaataaacttaataaaattgtaattacactggttataaggtaatttat

SEQ ID NO: 67925 - DNA, 50 bp, synthetic construct
  source 1..50: mol_type = other DNA
ttgttggagtgttccactttgttgctcggctgcttggaaaggaggacatt

SEQ ID NO: 67926 - DNA, 50 bp, synthetic construct
  source 1..50: mol_type = other DNA
agtcgttcaagttcatcacagcaaaaaattaaaaatttacttgaacgaaa

SEQ ID NO: 67927 - DNA, 50 bp, synthetic construct
  source 1..50: mol_type = other DNA
tggtctgcaaagacagtatttcggcgctaagattctgtctgactatgttg

SEQ ID NO: 67928 - DNA, 50 bp, synthetic construct
  source 1..50: mol_type = other DNA
taatggataaagaaaaagcaaaacaaaaatctctcattctttatccattt

SEQ ID NO: 67929 - DNA, 50 bp, synthetic construct
  source 1..50: mol_type = other DNA
tttgaggcactacaaacttttccatattgaaaagattgaggtatatgaaa

SEQ ID NO: 67930 - DNA, 50 bp, synthetic construct
  source 1..50: mol_type = other DNA
gggaaaagacttcaccatcacatcatggagcgatctattttatgagtcca

SEQ ID NO: 67931 - DNA, 50 bp, synthetic construct
  source 1..50: mol_type = other DNA
gcctgtcacgcggatggcggggacgaacgcacggcatccgcgttccgcat

SEQ ID NO: 67932 - DNA, 50 bp, synthetic construct
  source 1..50: mol_type = other DNA
cacttataaggattcttgatgcaaaaatattgcaaataaaattacaagtg

SEQ ID NO: 67933 - DNA, 50 bp, synthetic construct
  source 1..50: mol_type = other DNA
gcatcgcagtaggcgtagctgccgcccaacgataaccagcgctgcgatgt

SEQ ID NO: 67934 - DNA, 50 bp, synthetic construct
  source 1..50: mol_type = other DNA
acttcctttccgggcggtttgcccatcggccgcacgccccgctccaaccc

SEQ ID NO: 67935 - DNA, 50 bp, synthetic construct
  source 1..50: mol_type = other DNA
cacattaattgaagatgtagtattagaggtgaacataatcaattaatgct

SEQ ID NO: 67936 - DNA, 50 bp, synthetic construct
  source 1..50: mol_type = other DNA
ggcctcttgaaccccattcaagcgcgctcatggctgaatgggcaaagaaa

SEQ ID NO: 67937 - DNA, 50 bp, synthetic construct
  source 1..50: mol_type = other DNA
tgctgatttctcctttccgatcctctgttaaaagacaaattgtgagagcc

SEQ ID NO: 67938 - DNA, 50 bp, synthetic construct
  source 1..50: mol_type = other DNA
caggagttcgaatacatccagcaatatgaacggcactgttaaaagacaaa

SEQ ID NO: 67939 - DNA, 50 bp, synthetic construct
  source 1..50: mol_type = other DNA
ctatatgcgggagctgttttcaatttatagaaaaagaaaatcacaaaact

SEQ ID NO: 67940 - DNA, 50 bp, synthetic construct
  source 1..50: mol_type = other DNA
taccataataaatccatcctttcataaaagttaaaacaggcattatactt

SEQ ID NO: 67941 - DNA, 50 bp, synthetic construct
  source 1..50: mol_type = other DNA
caaataaccgattcaaaaaagctatttcattaaattgtttatacaaattg

SEQ ID NO: 67942 - DNA, 50 bp, synthetic construct
  source 1..50: mol_type = other DNA
aaagatagcaagtcatttataatgggaattaatttcttcttgttttcttc

SEQ ID NO: 67943 - DNA, 50 bp, synthetic construct
  source 1..50: mol_type = other DNA
ttcctcgccagccggcgttatccggcaggctacgcgcggctgggatgaag

SEQ ID NO: 67944 - DNA, 50 bp, synthetic construct
  source 1..50: mol_type = other DNA
ctcctttgtctgctgacaatcagtgcactgccggtgaacagacagcctgc

SEQ ID NO: 67945 - DNA, 50 bp, synthetic construct
  source 1..50: mol_type = other DNA
atatattcataacatatcatttatatcaaaatgataaacttaagttatat

SEQ ID NO: 67946 - DNA, 50 bp, synthetic construct
  source 1..50: mol_type = other DNA
aataaaaatggaggcgacacccagaacagtttgtaggtgatttttttgca

SEQ ID NO: 67947 - DNA, 50 bp, synthetic construct
  source 1..50: mol_type = other DNA
aaaaaaattggcatacagtagcagaacaaacataataataggattttttc

SEQ ID NO: 67948 - DNA, 50 bp, synthetic construct
  source 1..50: mol_type = other DNA
tacggtggaaatcatgggctccatgtgaaaagccaatgattcactagctc

SEQ ID NO: 67949 - DNA, 50 bp, synthetic construct
  source 1..50: mol_type = other DNA
cccttgtataacagaatcagggattcagcctgcgctctgcaaaaaaaggt

SEQ ID NO: 67950 - DNA, 50 bp, synthetic construct
  source 1..50: mol_type = other DNA
ttttcccttttcaagttgcagattataatactcaacctgtgcttcgaaac

SEQ ID NO: 67951 - DNA, 50 bp, synthetic construct
  source 1..50: mol_type = other DNA
taaactttgcccagctcacccagcgcgctggctgttatttttgtgccaat

SEQ ID NO: 67952 - DNA, 50 bp, synthetic construct
  source 1..50: mol_type = other DNA
ttggaatttctgatgttgtgtttgcaatcacattccataaataattcata

SEQ ID NO: 67953 - DNA, 50 bp, synthetic construct
  source 1..50: mol_type = other DNA
ttagagaaacaggttgggaatctgaacagtccaccggactgtttctccca

SEQ ID NO: 67954 - DNA, 50 bp, synthetic construct
  source 1..50: mol_type = other DNA
aagaaaatcggaatattgggtacctgacttccgaatatacctattttaat

SEQ ID NO: 67955 - DNA, 50 bp, synthetic construct
  source 1..50: mol_type = other DNA
aaaagtactacttatttaatgttgataaatatactccgaaagcaccgtta

SEQ ID NO: 67956 - DNA, 50 bp, synthetic construct
  source 1..50: mol_type = other DNA
ctaaaatagaagaaaataaaaacatattttttctactccttctcttttgt

SEQ ID NO: 67957 - DNA, 50 bp, synthetic construct
  source 1..50: mol_type = other DNA
gaccgtagatcgtgacgatgccgttcacggcattgtcatcgcctaccgca

SEQ ID NO: 67958 - DNA, 50 bp, synthetic construct
  source 1..50: mol_type = other DNA
acaagcagatttttatccgtcattgcaatgagcttcgcagcgtgatccgc

SEQ ID NO: 67959 - DNA, 50 bp, synthetic construct
  source 1..50: mol_type = other DNA
ctttttgactgttttatttgccatgatgggaggagaaaacagatgacaag

SEQ ID NO: 67960 - DNA, 50 bp, synthetic construct
  source 1..50: mol_type = other DNA
ccgaaaatttgaaacaacaaccaaagttaattgttaaagcagtcctgatt

SEQ ID NO: 67961 - DNA, 50 bp, synthetic construct
  source 1..50: mol_type = other DNA
cactcctttatatttgattttattaagataaaagaaaaataaaaaataaa

SEQ ID NO: 67962 - DNA, 50 bp, synthetic construct
  source 1..50: mol_type = other DNA
gccattttgaaagaaacaagcatttagctgattcaaaaaaacaaaaaggt

SEQ ID NO: 67963 - DNA, 50 bp, synthetic construct
  source 1..50: mol_type = other DNA
ctcggacgataagatcggagagctcgcagggcgtattcatttcgcccgag

SEQ ID NO: 67964 - DNA, 50 bp, synthetic construct
  source 1..50: mol_type = other DNA
gggttggagcggggcgtgcggccgatgggcaaaccgcccggaaaggaagt

SEQ ID NO: 67965 - DNA, 50 bp, synthetic construct
  source 1..50: mol_type = other DNA
gctatcatcggcccagagtattgggatgcggcggtttaccgcttacccca

SEQ ID NO: 67966 - DNA, 50 bp, synthetic construct
  source 1..50: mol_type = other DNA
gtcccattatttactttttcctgatctctgcgaaaattatcctattgagc

SEQ ID NO: 67967 - DNA, 50 bp, synthetic construct
  source 1..50: mol_type = other DNA
catcccagccacgctgacccgcttcaccaacggtcaggtcggctttgttg

SEQ ID NO: 67968 - DNA, 50 bp, synthetic construct
  source 1..50: mol_type = other DNA
tacattgtgatatattaataatgacaaagcaattcatatagatttgaata

SEQ ID NO: 67969 - DNA, 50 bp, synthetic construct
  source 1..50: mol_type = other DNA
cggtctgaagtatgtactgttcataaaaaaacaatatccatttctccgtc

SEQ ID NO: 67970 - DNA, 50 bp, synthetic construct
  source 1..50: mol_type = other DNA
ggcgtaaattccggcagcaaaaaacctcgcttacagccggtgtttcctcc

SEQ ID NO: 67971 - DNA, 50 bp, synthetic construct
  source 1..50: mol_type = other DNA
tctctttctataaattgtatgtttaaaaaagtggcttaattagccactta

SEQ ID NO: 67972 - DNA, 50 bp, synthetic construct
  source 1..50: mol_type = other DNA
gggtgttgtttttgggtagtgttgtacaaatataaaaaggctacgcactg

SEQ ID NO: 67973 - DNA, 50 bp, synthetic construct
  source 1..50: mol_type = other DNA
gattgataggaaggggctttcgcccctggtaaaatgccaggctatgaatt

SEQ ID NO: 67974 - DNA, 50 bp, synthetic construct
  source 1..50: mol_type = other DNA
aagctggtatgtggtatctgtggagctcacaggactattacaggagggca

SEQ ID NO: 67975 - DNA, 50 bp, synthetic construct
  source 1..50: mol_type = other DNA
caataacaattcctgcagcggcaataattccgtgaaaacctatacgccca

SEQ ID NO: 67976 - DNA, 50 bp, synthetic construct
  source 1..50: mol_type = other DNA
actccttttataacgtaaagacaatatagactacccaaggagaaaggagt

SEQ ID NO: 67977 - DNA, 50 bp, synthetic construct
  source 1..50: mol_type = other DNA
cattactaatatcattagaatccgtatggatatgaattataaaaatgtcg

SEQ ID NO: 67978 - DNA, 50 bp, synthetic construct
  source 1..50: mol_type = other DNA
tattctgcctgccgaacgggatcctcggatgctaatgaattaggagaatt

SEQ ID NO: 67979 - DNA, 50 bp, synthetic construct
  source 1..50: mol_type = other DNA
agccagttccacgacttgacgaaggttttcaaataatctccgaacctgct

SEQ ID NO: 67980 - DNA, 50 bp, synthetic construct
  source 1..50: mol_type = other DNA
gattgtttgtctcttcatctatatacgtatattcacagtcaaagtcaatc

SEQ ID NO: 67981 - DNA, 50 bp, synthetic construct
  source 1..50: mol_type = other DNA
tttagtatctttattacttcatattaatatacaataaataaaatgcaaaa

SEQ ID NO: 67982 - DNA, 50 bp, synthetic construct
  source 1..50: mol_type = other DNA
tatttaaaaaatagaagataaagcaatatttatttattactttttctttt

SEQ ID NO: 67983 - DNA, 50 bp, synthetic construct
  source 1..50: mol_type = other DNA
aaaacaatgctttgattttggaagaaattatgccataaaagacttgatat

SEQ ID NO: 67984 - DNA, 50 bp, synthetic construct
  source 1..50: mol_type = other DNA
caatcattgtgattacctccgaaaattttaagagataccaacaaaaacgg

SEQ ID NO: 67985 - DNA, 50 bp, synthetic construct
  source 1..50: mol_type = other DNA
gccgacaaaattttgatgtcctttttatagagctgtcggagttttacggc

SEQ ID NO: 67986 - DNA, 50 bp, synthetic construct
  source 1..50: mol_type = other DNA
gcggcattcgcaaggtcgccatggtcacattctcccctattgaatgtgta

SEQ ID NO: 67987 - DNA, 50 bp, synthetic construct
  source 1..50: mol_type = other DNA
cacaaaagcatcaaataaaatataatttagatttacgcgttgtgcttctt

SEQ ID NO: 67988 - DNA, 50 bp, synthetic construct
  source 1..50: mol_type = other DNA
atgggtcacacaccctatggatatagtttaccaaagactggttacaaaat

SEQ ID NO: 67989 - DNA, 50 bp, synthetic construct
  source 1..50: mol_type = other DNA
tatattgaatttttgaagataatatgatatacatataaaaattaattatt

SEQ ID NO: 67990 - DNA, 50 bp, synthetic construct
  source 1..50: mol_type = other DNA
atgtaggatcacctgtcctccgcttcagcttctgacagccatcggtgaat

SEQ ID NO: 67991 - DNA, 50 bp, synthetic construct
  source 1..50: mol_type = other DNA
agcaacattatattcaagaagaagataatcttcattatggtaatgtttca

SEQ ID NO: 67992 - DNA, 50 bp, synthetic construct
  source 1..50: mol_type = other DNA
ttctttgtattcgtgccagaaatgcccattgacaattcgtgcaccggagt

SEQ ID NO: 67993 - DNA, 50 bp, synthetic construct
  source 1..50: mol_type = other DNA
gaacggatagcggttagagtgctttgggagcgtctctgcgctatctgagc

SEQ ID NO: 67994 - DNA, 50 bp, synthetic construct
  source 1..50: mol_type = other DNA
cgtgtccggttccgtcaggacggcgctgctttcacacggcagaggtcacg

SEQ ID NO: 67995 - DNA, 50 bp, synthetic construct
  source 1..50: mol_type = other DNA
gattgtactaacaaagcagtaccgacaggcggtacatagttagtacgaca

SEQ ID NO: 67996 - DNA, 50 bp, synthetic construct
  source 1..50: mol_type = other DNA
taccgagatgaaaaaggacttcctattgggattatgctttgatctcggta

SEQ ID NO: 67997 - DNA, 50 bp, synthetic construct
  source 1..50: mol_type = other DNA
ttttccgataataatgtacccaaatacatgggcgatgcgatatttaaaat

SEQ ID NO: 67998 - DNA, 50 bp, synthetic construct
  source 1..50: mol_type = other DNA
tatctatattatgtatatatgttataattcttgaatttgtatagtagata

SEQ ID NO: 67999 - DNA, 50 bp, synthetic construct
  source 1..50: mol_type = other DNA
acacttacagaaagaaggtaatgatatctttactagaatatccgttgtga

SEQ ID NO: 68000 - DNA, 50 bp, synthetic construct
  source 1..50: mol_type = other DNA
gttgtactttttctgtcttgtagccggctaagcactataaaaatcccaaa

SEQ ID NO: 68001 - DNA, 50 bp, synthetic construct
  source 1..50: mol_type = other DNA
tggtggataaacctaatatataaatttttatattttgtgttcatttttgt

SEQ ID NO: 68002 - DNA, 50 bp, synthetic construct
  source 1..50: mol_type = other DNA
cagcgtaatatgcagcttgatttttaaaattcaaaatatcatgagaactg

SEQ ID NO: 68003 - DNA, 50 bp, synthetic construct
  source 1..50: mol_type = other DNA
tttcatgccgataatgcgatcgaattttcctctcgcttatcgctagaaag

SEQ ID NO: 68004 - DNA, 50 bp, synthetic construct
  source 1..50: mol_type = other DNA
tccaccagagcctttctctgttgtttttcacagagaattttttcattgga

SEQ ID NO: 68005 - DNA, 50 bp, synthetic construct
  source 1..50: mol_type = other DNA
ggttcggatttgttgtttttatagaacgctaaaaaaggcatatccaaact

SEQ ID NO: 68006 - DNA, 50 bp, synthetic construct
  source 1..50: mol_type = other DNA
cttgatgtccttaccctcccggcgggttccgggcttatttttacatctcc

SEQ ID NO: 68007 - DNA, 50 bp, synthetic construct
  source 1..50: mol_type = other DNA
taaggtgagacaggtattccccaagttgcaggaatgactgtcacattagc

SEQ ID NO: 68008 - DNA, 50 bp, synthetic construct
  source 1..50: mol_type = other DNA
cttgcgacaaaagagcatcggtctatggacataccggcttttttcatgca

SEQ ID NO: 68009 - DNA, 50 bp, synthetic construct
  source 1..50: mol_type = other DNA
agatacactgcatccctggcacaaaaccttgattttacaataaaatctcg

SEQ ID NO: 68010 - DNA, 50 bp, synthetic construct
  source 1..50: mol_type = other DNA
ggtatcgatactattgatgaatataactataatgtaatagtgagtttttc

SEQ ID NO: 68011 - DNA, 50 bp, synthetic construct
  source 1..50: mol_type = other DNA
ccatttcacttgtatatacatcactcttgatgtcaaggaaagataaataa

SEQ ID NO: 68012 - DNA, 50 bp, synthetic construct
  source 1..50: mol_type = other DNA
gcatttatcggtatgcaattggaaaattccaatgtggaaggcgaaaatgc

SEQ ID NO: 68013 - DNA, 50 bp, synthetic construct
  source 1..50: mol_type = other DNA
gattcgcgccctttggagaagcggatccactcatccaagggggcagatta

SEQ ID NO: 68014 - DNA, 50 bp, synthetic construct
  source 1..50: mol_type = other DNA
gatcgtaatttctgttcctgattccagaatgctttctgcaaatgcccagc

SEQ ID NO: 68015 - DNA, 50 bp, synthetic construct
  source 1..50: mol_type = other DNA
cgaaatccacgacaagtcattttcatagtctctgtatatcgtgcccatga

SEQ ID NO: 68016 - DNA, 50 bp, synthetic construct
  source 1..50: mol_type = other DNA
cgagtctctgatgtcggtattttacataagttatatgtctcagtgccata

SEQ ID NO: 68017 - DNA, 50 bp, synthetic construct
  source 1..50: mol_type = other DNA
taattgtaactttagccattaatatttattaatggaataaccttgtatta

SEQ ID NO: 68018 - DNA, 50 bp, synthetic construct
  source 1..50: mol_type = other DNA
gcaattaagcaaccaccttaagtttaattgtaactttagccattaatatt

SEQ ID NO: 68019 - DNA, 50 bp, synthetic construct
  source 1..50: mol_type = other DNA
ttttctgcatccagtgggcatcaattttgtagattacaaatcaacgtgaa

SEQ ID NO: 68020 - DNA, 50 bp, synthetic construct
  source 1..50: mol_type = other DNA
gataaatactattagttttgatacaaatctcgtaaataatgctattttag

SEQ ID NO: 68021 - DNA, 50 bp, synthetic construct
  source 1..50: mol_type = other DNA
atgtgctatactcacatgagattaatcttactcatacacatataaagaga

SEQ ID NO: 68022 - DNA, 50 bp, synthetic construct
  source 1..50: mol_type = other DNA
aaaaagccctgccacttttgaaacatttttcatccatgtcagagctgctc

SEQ ID NO: 68023 - DNA, 50 bp, synthetic construct
  source 1..50: mol_type = other DNA
cctgtgtgcctcatacagccacttttaaatttctttattattgaaacaaa

SEQ ID NO: 68024 - DNA, 50 bp, synthetic construct
  source 1..50: mol_type = other DNA
atgcagggcggtgacctctcccatatggaacattggtcggaatcctgcat

SEQ ID NO: 68025 - DNA, 50 bp, synthetic construct
  source 1..50: mol_type = other DNA
aaatccctgccgcctgccgtgttactgtcggagttttgcggcagcaggtt

SEQ ID NO: 68026 - DNA, 50 bp, synthetic construct
  source 1..50: mol_type = other DNA
ttttataaagaatttgaggacgaggtgtcgcctccatttttatttcttaa

SEQ ID NO: 68027 - DNA, 50 bp, synthetic construct
  source 1..50: mol_type = other DNA
attgattatataacaggccttatagctccaaacccttggatatgatagta

SEQ ID NO: 68028 - DNA, 50 bp, synthetic construct
  source 1..50: mol_type = other DNA
atcaatttctttgtgctcattcaaatggagtgaacaagagtgaatgtgag

SEQ ID NO: 68029 - DNA, 50 bp, synthetic construct
  source 1..50: mol_type = other DNA
tagttcttgttatcatgtcaaactgcagtttacggatttatcaaggtcgg

SEQ ID NO: 68030 - DNA, 50 bp, synthetic construct
  source 1..50: mol_type = other DNA
tcaggtaatcgtctcattggcctgcgcaggcaaatgcgacgggatagagg

SEQ ID NO: 68031 - DNA, 50 bp, synthetic construct
  source 1..50: mol_type = other DNA
gattatcttcatatcatctgacatcgatttttaatgtatgccctgacatt

SEQ ID NO: 68032 - DNA, 50 bp, synthetic construct
  source 1..50: mol_type = other DNA
caaagaaaaagttctctacgattgagccccgaataggggctttttctgtt

SEQ ID NO: 68033 - DNA, 50 bp, synthetic construct
  source 1..50: mol_type = other DNA
ttttttttatcctcattaatcaaaatagtcattatgaacagaatcaaaaa

SEQ ID NO: 68034 - DNA, 50 bp, synthetic construct
  source 1..50: mol_type = other DNA
cctcaagcggcaaaatcggcggagaaaaataccgaccatatttgggtaca

SEQ ID NO: 68035 - DNA, 50 bp, synthetic construct
  source 1..50: mol_type = other DNA
ttccagattatcgccctcgatgtagaggcaatgagtgaaagaatcaagaa

SEQ ID NO: 68036 - DNA, 50 bp, synthetic construct
  source 1..50: mol_type = other DNA
tgcccgagaaggaatgcgccggcggccgctggcgacaggcggcatttggc

SEQ ID NO: 68037 - DNA, 50 bp, synthetic construct
  source 1..50: mol_type = other DNA
atcggcccgggaacagcagctgcccggtgcttagcacctcttgtgccgcc

SEQ ID NO: 68038 - DNA, 50 bp, synthetic construct
  source 1..50: mol_type = other DNA
aaacgtacaatatggcagaataaacaggtaggctgatcaataatgcgtgg

SEQ ID NO: 68039 - DNA, 50 bp, synthetic construct
  source 1..50: mol_type = other DNA
gcattttctgatgcaccaaccagatatctttatcatttgatagaaaataa

SEQ ID NO: 68040 - DNA, 50 bp, synthetic construct
  source 1..50: mol_type = other DNA
ttctgcctgttctgctggattttcaaaaaatcgaagcactggagcgagag

SEQ ID NO: 68041 - DNA, 50 bp, synthetic construct
  source 1..50: mol_type = other DNA
tgtagtatgttagctctttttcgatgggggaaatatgctgacatactgtg

SEQ ID NO: 68042 - DNA, 50 bp, synthetic construct
  source 1..50: mol_type = other DNA
cacagattcgccttatttttcaaaatcctgaaaataatgtgtggaatgag

SEQ ID NO: 68043 - DNA, 50 bp, synthetic construct
  source 1..50: mol_type = other DNA
agatgaattgtatgtctgcgagtaaggttacgcagccttacatatcacat

SEQ ID NO: 68044 - DNA, 50 bp, synthetic construct
  source 1..50: mol_type = other DNA
actatacggaaatcataacaagaaatttcttgcgttggttgccgttcacc

SEQ ID NO: 68045 - DNA, 50 bp, synthetic construct
  source 1..50: mol_type = other DNA
taagttattagatataaatgattataccgataattatacccttgaaaccg

SEQ ID NO: 68046 - DNA, 50 bp, synthetic construct
  source 1..50: mol_type = other DNA
tattaggctttttatagtagtctttggacgctactacaaaaagcccaata

SEQ ID NO: 68047 - DNA, 50 bp, synthetic construct
  source 1..50: mol_type = other DNA
tgcgacaaaattgattactttctgtacacataataatcaatattgtcgca

SEQ ID NO: 68048 - DNA, 50 bp, synthetic construct
  source 1..50: mol_type = other DNA
gtaatagtatgccccaaatattccttttgatatatgttagatagcataac

SEQ ID NO: 68049 - DNA, 50 bp, synthetic construct
  source 1..50: mol_type = other DNA
tcacaatgcccgcctcaatcccggtctttttctggaccacggcatctttc

SEQ ID NO: 68050 - DNA, 50 bp, synthetic construct
  source 1..50: mol_type = other DNA
acctgcggcagctccttcgggtcgatgattcagatgggcttgctccactc

SEQ ID NO: 68051 - DNA, 50 bp, synthetic construct
  source 1..50: mol_type = other DNA
cagtcattccgccgaccatcaatccgcttggataggcggtggcaagtatg

SEQ ID NO: 68052 - DNA, 50 bp, synthetic construct
  source 1..50: mol_type = other DNA
taaaacgctcacttcttattgacaattgcggtgttccagtggaaacgggt

SEQ ID NO: 68053 - DNA, 50 bp, synthetic construct
  source 1..50: mol_type = other DNA
gaatgaagacattttattatttccttttaatttcttcaattaattcatca

SEQ ID NO: 68054 - DNA, 50 bp, synthetic construct
  source 1..50: mol_type = other DNA
cttgccattcttatcatcctttctctgaaccggatgataagaagttcaac

SEQ ID NO: 68055 - DNA, 50 bp, synthetic construct
  source 1..50: mol_type = other DNA
ctgtgtatggtctctataatttcttcagagattcctgaacccgatgatac

SEQ ID NO: 68056 - DNA, 50 bp, synthetic construct
  source 1..50: mol_type = other DNA
caagccttacctccttccgttttggtagaaaatgaacagcgtgttgcagt

SEQ ID NO: 68057 - DNA, 50 bp, synthetic construct
  source 1..50: mol_type = other DNA
cagattcggatgtttttccagatatttatggacgaaaacaaaaaaatagt

SEQ ID NO: 68058 - DNA, 50 bp, synthetic construct
  source 1..50: mol_type = other DNA
cacatgggcacctggctgttgcccgcggacatcatgatttctctctgatt

SEQ ID NO: 68059 - DNA, 50 bp, synthetic construct
  source 1..50: mol_type = other DNA
tggcgctacagtcacgcccaacggcgaacaaatgcgtgaccgtgacgctg

SEQ ID NO: 68060 - DNA, 50 bp, synthetic construct
  source 1..50: mol_type = other DNA
agacattgtttcaacaatgtttaaaatttaagtagaggtttataatgtct

SEQ ID NO: 68061 - DNA, 50 bp, synthetic construct
  source 1..50: mol_type = other DNA
aatcttcacctttagcttttttcgtcagaaaaattcaaggagttcagatt

SEQ ID NO: 68062 - DNA, 50 bp, synthetic construct
  source 1..50: mol_type = other DNA
atattgttggaatgattatcctggctgcacttttttcatggcaactttac

SEQ ID NO: 68063 - DNA, 50 bp, synthetic construct
  source 1..50: mol_type = other DNA
ttcgtttatggtaacagagacatagctattgcgtattccaaatattcttt

SEQ ID NO: 68064 - DNA, 50 bp, synthetic construct
  source 1..50: mol_type = other DNA
taaaatccccgacaatattctgtccggcctgaatgatgatggggaggttt

SEQ ID NO: 68065 - DNA, 50 bp, synthetic construct
  source 1..50: mol_type = other DNA
tgtgtccacacggcactgaaccattggtcttcctggtccgttgacacacg

SEQ ID NO: 68066 - DNA, 50 bp, synthetic construct
  source 1..50: mol_type = other DNA
cataaaggacagtgacctcacccatatgcgtgatagcagtggtagcaatc

SEQ ID NO: 68067 - DNA, 50 bp, synthetic construct
  source 1..50: mol_type = other DNA
gaagttgatgaatgggtcagagaagggtgtgtggcccatttaatcaccaa

SEQ ID NO: 68068 - DNA, 50 bp, synthetic construct
  source 1..50: mol_type = other DNA
acgttaatattacaaactattttatataaaggaacaccagataaaaacat

SEQ ID NO: 68069 - DNA, 50 bp, synthetic construct
  source 1..50: mol_type = other DNA
aaccgcctgtaaaaatcgccgctgtacctgtctctgtatctgagactgta

SEQ ID NO: 68070 - DNA, 50 bp, synthetic construct
  source 1..50: mol_type = other DNA
tcttatttccacaaattcctcatttggacgaaggtaaagaacttataaga

SEQ ID NO: 68071 - DNA, 50 bp, synthetic construct
  source 1..50: mol_type = other DNA
atcaacaattaatccaattactaaattcagtagatggtacagatgttaag

SEQ ID NO: 68072 - DNA, 50 bp, synthetic construct
  source 1..50: mol_type = other DNA
ggctgttatttttttgcctaaaatagaggttaggaaaacaaaagtttgaa

SEQ ID NO: 68073 - DNA, 50 bp, synthetic construct
  source 1..50: mol_type = other DNA
taagccgcccggttcatcgccggacgtccggcgtttcgaagggcgcaaga

SEQ ID NO: 68074 - DNA, 50 bp, synthetic construct
  source 1..50: mol_type = other DNA
tttctttatccgaaagtctttatttaaatatggcatatcttcgtgtagta

SEQ ID NO: 68075 - DNA, 50 bp, synthetic construct
  source 1..50: mol_type = other DNA
atgttgacggcaacggaacggttgcgcaaggcaaaaccggggatccacgc

SEQ ID NO: 68076 - DNA, 50 bp, synthetic construct
  source 1..50: mol_type = other DNA
ccggcagggtaaaaaggcatccggtgctgaatggttttgtgttcctcggg

SEQ ID NO: 68077 - DNA, 50 bp, synthetic construct
  source 1..50: mol_type = other DNA
atttacaacgatatttccacatataaatatatggaagcactactttatac

SEQ ID NO: 68078 - DNA, 50 bp, synthetic construct
  source 1..50: mol_type = other DNA
agctgagctataaccccatgtcagatcttccatggcgttgactggtttca

SEQ ID NO: 68079 - DNA, 50 bp, synthetic construct
  source 1..50: mol_type = other DNA
gcaattgtccttgcccgagaaggatttcattttagagtttggacatgatt

SEQ ID NO: 68080 - DNA, 50 bp, synthetic construct
  source 1..50: mol_type = other DNA
tctaaatatgctgtataatcggtatatcttcgtgtagtatattccgctga

SEQ ID NO: 68081 - DNA, 50 bp, synthetic construct
  source 1..50: mol_type = other DNA
gccacggtgccgtcggatttgtggcgcaccacgggcgaactggaaggtgc

SEQ ID NO: 68082 - DNA, 50 bp, synthetic construct
  source 1..50: mol_type = other DNA
tgttgaggcggaaatcgtagaggatgccattttcgattcggtatccataa

SEQ ID NO: 68083 - DNA, 50 bp, synthetic construct
  source 1..50: mol_type = other DNA
cacgcggtgaaaggagaatgacacttggcgttcgctcccatcagtgcgtt

SEQ ID NO: 68084 - DNA, 50 bp, synthetic construct
  source 1..50: mol_type = other DNA
acgcatggaaagaaaccttcttgcttgcaaaaaatggttgacaaatgccc

SEQ ID NO: 68085 - DNA, 50 bp, synthetic construct
  source 1..50: mol_type = other DNA
tctcgctccttgccgggaagaacaaaggttctagaccaagtagaaactga

SEQ ID NO: 68086 - DNA, 50 bp, synthetic construct
  source 1..50: mol_type = other DNA
cttgccatgctcctcttgaatctctagataatcagttgccgcatggttca

SEQ ID NO: 68087 - DNA, 50 bp, synthetic construct
  source 1..50: mol_type = other DNA
accatgtttgtcaagccgtcactgcacttagacggattcttcgacaaggt

SEQ ID NO: 68088 - DNA, 50 bp, synthetic construct
  source 1..50: mol_type = other DNA
cggcgcccaggatgtctgtttctgcggggaacatgccccaaccatcgccg

SEQ ID NO: 68089 - DNA, 50 bp, synthetic construct
  source 1..50: mol_type = other DNA
catacaccgtagattttctaaataagacttgataaataaccacttgtacg

SEQ ID NO: 68090 - DNA, 50 bp, synthetic construct
  source 1..50: mol_type = other DNA
atcaaatattaactaatgagaaatataggttaatcgaggtgatagatgat

SEQ ID NO: 68091 - DNA, 50 bp, synthetic construct
  source 1..50: mol_type = other DNA
aacgtccgaccaaaaatccacggacgttccgaccggtcaaggaggacgag

SEQ ID NO: 68092 - DNA, 50 bp, synthetic construct
  source 1..50: mol_type = other DNA
tttgacgtataagtttgatacaaataggcccaaaaaaatcataaaaacaa

SEQ ID NO: 68093 - DNA, 50 bp, synthetic construct
  source 1..50: mol_type = other DNA
atcagggcaaggaaaccggacatggcggccacacgtttctttgccactgg

SEQ ID NO: 68094 - DNA, 50 bp, synthetic construct
  source 1..50: mol_type = other DNA
aatcacgaggccattattccccgcgaggacagccgacaggcttcgcaggc

SEQ ID NO: 68095 - DNA, 50 bp, synthetic construct
  source 1..50: mol_type = other DNA
atagtggaataatagaaaaagcaaaattgcgtttgctattagtacgaaat

SEQ ID NO: 68096 - DNA, 50 bp, synthetic construct
  source 1..50: mol_type = other DNA
ttgtgctaggctttttcttaccatccgtatgaagcaaaagcgctgcattt

SEQ ID NO: 68097 - DNA, 50 bp, synthetic construct
  source 1..50: mol_type = other DNA
gttcaaaggtgcttttgcaggacaaaactcctctccccgcacctttgaga

SEQ ID NO: 68098 - DNA, 50 bp, synthetic construct
  source 1..50: mol_type = other DNA
aaggaggaaccagaatgcctaaagtttatcatccatgaaagttcctcctt

SEQ ID NO: 68099 - DNA, 50 bp, synthetic construct
  source 1..50: mol_type = other DNA
gctcttgaggaataattaaaaaatgcatagcccaaagaggaataattgaa

SEQ ID NO: 68100 - DNA, 50 bp, synthetic construct
  source 1..50: mol_type = other DNA
aaacataatcacagtcctcctcattttatgcagggaatgggaaaatattc

SEQ ID NO: 68101 - DNA, 50 bp, synthetic construct
  source 1..50: mol_type = other DNA
attattaagtgtgatatttcggattagggtaaaatataagagtgcattat

SEQ ID NO: 68102 - DNA, 50 bp, synthetic construct
  source 1..50: mol_type = other DNA
gaagtatcaaaggggctatatcaaatttgatttacaccgcccagatgatc

SEQ ID NO: 68103 - DNA, 50 bp, synthetic construct
  source 1..50: mol_type = other DNA
agaaaggagaataccgaaatgaagaaagcccggaggatattccccccggg

SEQ ID NO: 68104 - DNA, 50 bp, synthetic construct
  source 1..50: mol_type = other DNA
gcttcgcacaaaaacaagaaataagctgatttcatgaaaatacacgtcat

SEQ ID NO: 68105 - DNA, 50 bp, synthetic construct
  source 1..50: mol_type = other DNA
ggaaaaagaaatattagtataatgtacatattaacaaatccgtcttttcc

SEQ ID NO: 68106 - DNA, 50 bp, synthetic construct
  source 1..50: mol_type = other DNA
cttccattccaccggaattgataattatgtcaatttacatgatatgtacg

SEQ ID NO: 68107 - DNA, 50 bp, synthetic construct
  source 1..50: mol_type = other DNA
gtcttgatacaatgaataataggtatcaaacttatacgtcaaatcgcttg

SEQ ID NO: 68108 - DNA, 50 bp, synthetic construct
  source 1..50: mol_type = other DNA
ggtgaaaaaaaaattatttcttcaatggaagtattaaaaattctaaatgg

SEQ ID NO: 68109 - DNA, 50 bp, synthetic construct
  source 1..50: mol_type = other DNA
ggtatctatattagctcttactgcctgcaacgggagcgattccagatagc

SEQ ID NO: 68110 - DNA, 50 bp, synthetic construct
  source 1..50: mol_type = other DNA
atgcgtgtaaaggtgattggtgtccacggaacgatgaccttggaaacgca

SEQ ID NO: 68111 - DNA, 50 bp, synthetic construct
  source 1..50: mol_type = other DNA
ccgtgataatctccccctttccgatgtcggagtatgaccgaatataacat

SEQ ID NO: 68112 - DNA, 50 bp, synthetic construct
  source 1..50: mol_type = other DNA
ttctaagttcttcaaatacacctaatttttaatatatgtagcagttagaa

SEQ ID NO: 68113 - DNA, 50 bp, synthetic construct
  source 1..50: mol_type = other DNA
ggaactcgaatgtaatcgtccagtcttttggatttttactcataatttct

SEQ ID NO: 68114 - DNA, 50 bp, synthetic construct
  source 1..50: mol_type = other DNA
tctttcgactggatttgaactgcgattttagtttatttttaatcttaaga

SEQ ID NO: 68115 - DNA, 50 bp, synthetic construct
  source 1..50: mol_type = other DNA
atttataacactatgccagtctaagaattaaataccaaacaaatatgaaa

SEQ ID NO: 68116 - DNA, 50 bp, synthetic construct
  source 1..50: mol_type = other DNA
catacttgtaaatctgccgtgcacagtgattcaggcaatgtatgagtatg

SEQ ID NO: 68117 - DNA, 50 bp, synthetic construct
  source 1..50: mol_type = other DNA
ttctgttacaatcagccatttattattcaatatgaaggtcggaatatatt

SEQ ID NO: 68118 - DNA, 50 bp, synthetic construct
  source 1..50: mol_type = other DNA
atcttaggaaatcctttctacatgataatgtggaactccctgccatgcat

SEQ ID NO: 68119 - DNA, 50 bp, synthetic construct
  source 1..50: mol_type = other DNA
tggaaacgctaaatctgccaacagtttttctggcagaagccgaccatgga

SEQ ID NO: 68120 - DNA, 50 bp, synthetic construct
  source 1..50: mol_type = other DNA
aataacacctatacggtgccggatttcgccccctcgttatatgtgtagat

SEQ ID NO: 68121 - DNA, 50 bp, synthetic construct
  source 1..50: mol_type = other DNA
gtatgctataatccagcccttaagcccgccggggctggaagatggtcatc

SEQ ID NO: 68122 - DNA, 50 bp, synthetic construct
  source 1..50: mol_type = other DNA
cagcttggtaagatgttcatggtgaaaggtatcgcagattgtacttgcta

SEQ ID NO: 68123 - DNA, 50 bp, synthetic construct
  source 1..50: mol_type = other DNA
gaggagaaggaagaaccgctcacaaagcggaatgggaaagacttctgtga

SEQ ID NO: 68124 - DNA, 50 bp, synthetic construct
  source 1..50: mol_type = other DNA
ttcatctcctgcaactgctgttacgacatcctttttagattggagatgat

SEQ ID NO: 68125 - DNA, 50 bp, synthetic construct
  source 1..50: mol_type = other DNA
tacaatttcttgatgaaattcacatggttgaggtttatgcagacgatggt

SEQ ID NO: 68126 - DNA, 50 bp, synthetic construct
  source 1..50: mol_type = other DNA
atcacatcgttgtcgttgcgtcctcgcaggccgcattaccattctgtaaa

SEQ ID NO: 68127 - DNA, 50 bp, synthetic construct
  source 1..50: mol_type = other DNA
cggtataatcgtaactttaggcattaatgcttgtcgtgtcgatcaccgtg

SEQ ID NO: 68128 - DNA, 50 bp, synthetic construct
  source 1..50: mol_type = other DNA
aaattgtttacgaaaaactagataaaaaggtagtctttatcgttctaatg

SEQ ID NO: 68129 - DNA, 50 bp, synthetic construct
  source 1..50: mol_type = other DNA
tctagactgcttcctagattgcactagtcgtttaatgtcagcagtgtatt

SEQ ID NO: 68130 - DNA, 50 bp, synthetic construct
  source 1..50: mol_type = other DNA
cataaaatccagtcttttggctggatatatgtgcgaagctggacgctaag

SEQ ID NO: 68131 - DNA, 50 bp, synthetic construct
  source 1..50: mol_type = other DNA
ctttttatccttactcggcttgtagctaagtagagccacaggataataag

SEQ ID NO: 68132 - DNA, 50 bp, synthetic construct
  source 1..50: mol_type = other DNA
gagtgggtggcaggactcagcagaaatcttgtgaatcatgcggttgcttg

SEQ ID NO: 68133 - DNA, 50 bp, synthetic construct
  source 1..50: mol_type = other DNA
ataggctctgaggttattccaacagaacggagaagaacctccgaaggaat

SEQ ID NO: 68134 - DNA, 50 bp, synthetic construct
  source 1..50: mol_type = other DNA
gttttctgcggtgagccgcagtctgcaacggcttgcaacaaacttaaaac

SEQ ID NO: 68135 - DNA, 50 bp, synthetic construct
  source 1..50: mol_type = other DNA
ctttagtcgtcatatcatatcacctttcctgaatgatagaccgccagaac

SEQ ID NO: 68136 - DNA, 50 bp, synthetic construct
  source 1..50: mol_type = other DNA
actgggtgcaaactgcaattgagcaaggctaattattaactacacttttt

SEQ ID NO: 68137 - DNA, 50 bp, synthetic construct
  source 1..50: mol_type = other DNA
atagagcagaaggactacaggcttgcaattcgggtcttattctgaactgc

SEQ ID NO: 68138 - DNA, 50 bp, synthetic construct
  source 1..50: mol_type = other DNA
tttttggataaatattggataatattctcgagccgtctcgcaccccaaaa

SEQ ID NO: 68139 - DNA, 50 bp, synthetic construct
  source 1..50: mol_type = other DNA
tttaccctaattgtacgtatggattcaaccatggtgacaattagggtaaa

SEQ ID NO: 68140 - DNA, 50 bp, synthetic construct
  source 1..50: mol_type = other DNA
tttctctttatcttgaaatgtgattaacatctgaacatgctaacgaacca

SEQ ID NO: 68141 - DNA, 50 bp, synthetic construct
  source 1..50: mol_type = other DNA
ggtgatgttgtggacctgttcaccaagggtgtatggcccatctaatcacc

SEQ ID NO: 68142 - DNA, 50 bp, synthetic construct
  source 1..50: mol_type = other DNA
gacatagaatcataaaaagagcaagccgtgctcggaaatatccggctgaa

SEQ ID NO: 68143 - DNA, 50 bp, synthetic construct
  source 1..50: mol_type = other DNA
gcgacagccaaggtggggagccagacggcgcttttctgttgtggatcaga

SEQ ID NO: 68144 - DNA, 50 bp, synthetic construct
  source 1..50: mol_type = other DNA
gaagaacttgcattatcaaagcaaattcgctatgataaaaacgatttcaa

SEQ ID NO: 68145 - DNA, 50 bp, synthetic construct
  source 1..50: mol_type = other DNA
attttaatgtgaaaaagcttgaccttgctgaagcttatatgtcaatctct

SEQ ID NO: 68146 - DNA, 50 bp, synthetic construct
  source 1..50: mol_type = other DNA
aaagcacgatatatccagtgatttcattgtcggtgtgctgatcgcgctgt

SEQ ID NO: 68147 - DNA, 50 bp, synthetic construct
  source 1..50: mol_type = other DNA
gatgatatcaaggaagccttcgtccggggacttatacacttgataattgt

SEQ ID NO: 68148 - DNA, 50 bp, synthetic construct
  source 1..50: mol_type = other DNA
agggttttttcaatttcatttttctgttcctattatcagcaaaataccct

SEQ ID NO: 68149 - DNA, 50 bp, synthetic construct
  source 1..50: mol_type = other DNA
tactttatttgccatattgatttaaaggaatcagaatcgcaaaagaaaaa

SEQ ID NO: 68150 - DNA, 50 bp, synthetic construct
  source 1..50: mol_type = other DNA
ttatatcaagcgatttgacgtataagtatagaaaaaagtaggttttattt

SEQ ID NO: 68151 - DNA, 50 bp, synthetic construct
  source 1..50: mol_type = other DNA
gcttaattgctgtaattgaaaacaattggttattattcttttaaaaaagc

SEQ ID NO: 68152 - DNA, 50 bp, synthetic construct
  source 1..50: mol_type = other DNA
gaccttcagaagaaccaccccaacgaaggggggtggcgctgttgccgaaa

SEQ ID NO: 68153 - DNA, 50 bp, synthetic construct
  source 1..50: mol_type = other DNA
ccttaatgctttcatctcgcttttgaagtagagagcctcaacaaaaagat

SEQ ID NO: 68154 - DNA, 50 bp, synthetic construct
  source 1..50: mol_type = other DNA
gaacggagattgaataacgattaaaaggaatcgtctttcatattagcctc

SEQ ID NO: 68155 - DNA, 50 bp, synthetic construct
  source 1..50: mol_type = other DNA
aaaatactgctatttgattgataatatatggtagaaaattcgcatatttt

SEQ ID NO: 68156 - DNA, 50 bp, synthetic construct
  source 1..50: mol_type = other DNA
attatactatacaaattattatagcagtttattctttgaaatagcccaat

SEQ ID NO: 68157 - DNA, 50 bp, synthetic construct
  source 1..50: mol_type = other DNA
agtttctaaccaacatatttactaattaaaaacactggaggcgagaaaaa

SEQ ID NO: 68158 - DNA, 50 bp, synthetic construct
  source 1..50: mol_type = other DNA
gaactcaccgcctttctcggaagaaccgccccgaatgcggcggtgactta

SEQ ID NO: 68159 - DNA, 50 bp, synthetic construct
  source 1..50: mol_type = other DNA
gtggcagcctactgccgtgtgtcaaccgacacagatcattgatctggcat

SEQ ID NO: 68160 - DNA, 50 bp, synthetic construct
  source 1..50: mol_type = other DNA
gcggtggtttttacggcaaaaaggtggtataatgcctaaaaaagttgcga

SEQ ID NO: 68161 - DNA, 50 bp, synthetic construct
  source 1..50: mol_type = other DNA
caaatgaaaccatttgaaaccgtatccccagtatttcccggtatcacgga

SEQ ID NO: 68162 - DNA, 50 bp, synthetic construct
  source 1..50: mol_type = other DNA
ctttttatatttatagtgaaaatgtatatacttgctaattggttaaaaaa

SEQ ID NO: 68163 - DNA, 50 bp, synthetic construct
  source 1..50: mol_type = other DNA
aaaaggttacttatgatgatgtaaatttagttagcttggaattacgatta

SEQ ID NO: 68164 - DNA, 50 bp, synthetic construct
  source 1..50: mol_type = other DNA
tactgcttttgcagtgttcgtgttatttttccaaaccgcctccgaacact

SEQ ID NO: 68165 - DNA, 50 bp, synthetic construct
  source 1..50: mol_type = other DNA
ttacatctggttgcttcgcggcaaatttgcgagcgtccaagcagattacg

SEQ ID NO: 68166 - DNA, 50 bp, synthetic construct
  source 1..50: mol_type = other DNA
aatccataagtttttataaagtttttagagctttacaaaacaaatcccga

SEQ ID NO: 68167 - DNA, 50 bp, synthetic construct
  source 1..50: mol_type = other DNA
tcttattaacactttcgtcacaaatatatgagaagaaagaaagtcgaggg

SEQ ID NO: 68168 - DNA, 50 bp, synthetic construct
  source 1..50: mol_type = other DNA
ttctctgcgtggacggtggagcttgccagctccgcagcgaaggcaaggag

SEQ ID NO: 68169 - DNA, 50 bp, synthetic construct
  source 1..50: mol_type = other DNA
gttatagaataccagtatcaataatattatagataaggaactatatgaag

SEQ ID NO: 68170 - DNA, 50 bp, synthetic construct
  source 1..50: mol_type = other DNA
agatacatccaccatgacggctatgcatatttctctcatgtcgtgtataa

SEQ ID NO: 68171 - DNA, 50 bp, synthetic construct
  source 1..50: mol_type = other DNA
ccaatttttatatttcgcttttttataaaaaagtgagcatcaaagcataa

SEQ ID NO: 68172 - DNA, 50 bp, synthetic construct
  source 1..50: mol_type = other DNA
agcctggtcacttttttaaatgtttaaacgtttagacaaacgaaagactt

SEQ ID NO: 68173 - DNA, 50 bp, synthetic construct
  source 1..50: mol_type = other DNA
attagatatttttgaaatggtgcaaaatatatctttcaaaaataatggaa

SEQ ID NO: 68174 - DNA, 50 bp, synthetic construct
  source 1..50: mol_type = other DNA
ggcaccaccagcggcctgactgcggccagaccacgacctatggtgcactg

SEQ ID NO: 68175 - DNA, 50 bp, synthetic construct
  source 1..50: mol_type = other DNA
gcgacaacagtgcaataagggtcagcttatgctattgccaatgtagacgt

SEQ ID NO: 68176 - DNA, 50 bp, synthetic construct
  source 1..50: mol_type = other DNA
aaatatcacttgtcgagtaaaacagatttatacctatacaaaaacaatct

SEQ ID NO: 68177 - DNA, 50 bp, synthetic construct
  source 1..50: mol_type = other DNA
tgtgataagcaagacaggagcagaacttatcaccgagccagtttattaca

SEQ ID NO: 68178 - DNA, 50 bp, synthetic construct
  source 1..50: mol_type = other DNA
agcggtcaaaatttatcggcgctccaataagccgcaggaggttgacggca

SEQ ID NO: 68179 - DNA, 50 bp, synthetic construct
  source 1..50: mol_type = other DNA
tctatttccaaagaattttcagtattgactggatatatttcaaaatcaga

SEQ ID NO: 68180 - DNA, 50 bp, synthetic construct
  source 1..50: mol_type = other DNA
attctgcgaggttttttgtttttcggcaactgcatcgaaccagtctgccg

SEQ ID NO: 68181 - DNA, 50 bp, synthetic construct
  source 1..50: mol_type = other DNA
tttctttcagcggataatagaatatacgctttttttacggcagaaagaag

SEQ ID NO: 68182 - DNA, 50 bp, synthetic construct
  source 1..50: mol_type = other DNA
tggtgaaaacaactttaatctaacaaatatgattaaaaaactcctcaccg

SEQ ID NO: 68183 - DNA, 50 bp, synthetic construct
  source 1..50: mol_type = other DNA
aatgacgcccttgccgatgtactctagcccaggacgctcatggcgtcgtc

SEQ ID NO: 68184 - DNA, 50 bp, synthetic construct
  source 1..50: mol_type = other DNA
tcgtcgtcaatccagacgagcagaacgctcctcggtagaattgacgacga

SEQ ID NO: 68185 - DNA, 50 bp, synthetic construct
  source 1..50: mol_type = other DNA
cctgcgccgacgatgatggggaaatccgtcagcatcatactgatcaatga

SEQ ID NO: 68186 - DNA, 50 bp, synthetic construct
  source 1..50: mol_type = other DNA
agcggttcctggacgattcggactataatgaaaatcggagaggaggattc

SEQ ID NO: 68187 - DNA, 50 bp, synthetic construct
  source 1..50: mol_type = other DNA
cgtctttccaatatcgggaacgcaattgcgttccaatttatggtggggtg

SEQ ID NO: 68188 - DNA, 50 bp, synthetic construct
  source 1..50: mol_type = other DNA
aaggcgaaaagttgccggatatgcacgcagtttcggctatttttctctca

SEQ ID NO: 68189 - DNA, 50 bp, synthetic construct
  source 1..50: mol_type = other DNA
taacattacacaaatctgcttttttgaaatcagatggcaaaggacggcac

SEQ ID NO: 68190 - DNA, 50 bp, synthetic construct
  source 1..50: mol_type = other DNA
tgtaaaatcaaatcctaaaaaagaagccttttttcaagaaaatttttaaa

SEQ ID NO: 68191 - DNA, 50 bp, synthetic construct
  source 1..50: mol_type = other DNA
ccgattgaacggcataatgaatgcgtgtatctgttatgcctgtatctcag

SEQ ID NO: 68192 - DNA, 50 bp, synthetic construct
  source 1..50: mol_type = other DNA
tacatcactctttacgccctggaagtcatgtgggagatacgctcgttttg

SEQ ID NO: 68193 - DNA, 50 bp, synthetic construct
  source 1..50: mol_type = other DNA
atggacagcagaataaatattgttgtcacacgttttacaagcaattcaat

SEQ ID NO: 68194 - DNA, 50 bp, synthetic construct
  source 1..50: mol_type = other DNA
aatagattttccttctttatacatatatgtatttagtagcttatgctaga

SEQ ID NO: 68195 - DNA, 50 bp, synthetic construct
  source 1..50: mol_type = other DNA
cagctttttcagctgctacctcttttagccgttgccagctttaagcgctc

SEQ ID NO: 68196 - DNA, 50 bp, synthetic construct
  source 1..50: mol_type = other DNA
tcttaataccttacctatttggtttaaattgaaggatttacttaaacaga

SEQ ID NO: 68197 - DNA, 50 bp, synthetic construct
  source 1..50: mol_type = other DNA
agtgcaaaaacaggacatttaaaatattttagtatgaaatgatttgagaa

SEQ ID NO: 68198 - DNA, 50 bp, synthetic construct
  source 1..50: mol_type = other DNA
aatgtaagaataatctatattattataatgatataattgttaattaggag

SEQ ID NO: 68199 - DNA, 50 bp, synthetic construct
  source 1..50: mol_type = other DNA
tatcgccctgtagtgcgcaactatttatagttttgatgtttttggacata

SEQ ID NO: 68200 - DNA, 50 bp, synthetic construct
  source 1..50: mol_type = other DNA
tatgatttaaggtgtgaaaaattgttcaacgctccacacttttaatataa

SEQ ID NO: 68201 - DNA, 50 bp, synthetic construct
  source 1..50: mol_type = other DNA
taatccgaagaaacaaatccataatatgcataatttaccgtatccccatc

SEQ ID NO: 68202 - DNA, 50 bp, synthetic construct
  source 1..50: mol_type = other DNA
tcttcttccgtgaatcggcagcgaccacggccctgccggattgaagctga

SEQ ID NO: 68203 - DNA, 50 bp, synthetic construct
  source 1..50: mol_type = other DNA
agaaattcgtatatggaagaaatattaattaatgatatatgcgatttaat

SEQ ID NO: 68204 - DNA, 50 bp, synthetic construct
  source 1..50: mol_type = other DNA
tttattcattaattttttctaataatctaacaaataaatcgatagataat

SEQ ID NO: 68205 - DNA, 50 bp, synthetic construct
  source 1..50: mol_type = other DNA
gaagttgtttccatttaatattgtcaacattataaaattcaagaaattct

SEQ ID NO: 68206 - DNA, 50 bp, synthetic construct
  source 1..50: mol_type = other DNA
acgtatagtctttatttaaaattgtttatagcaaatgattaacaatatct

SEQ ID NO: 68207 - DNA, 50 bp, synthetic construct
  source 1..50: mol_type = other DNA
cgagcataaattactgtattcatgtgaatttcttcagatatgtatgctct

SEQ ID NO: 68208 - DNA, 50 bp, synthetic construct
  source 1..50: mol_type = other DNA
taaaaagtcctcatggtcgaaatagccgccataaatatttttgcttttct

SEQ ID NO: 68209 - DNA, 50 bp, synthetic construct
  source 1..50: mol_type = other DNA
gaaaagccgcctcccgttcctcctgggcatatccggcaacgcggcgtttc

SEQ ID NO: 68210 - DNA, 50 bp, synthetic construct
  source 1..50: mol_type = other DNA
atagatataaaacaattgaagatatttttcttttccaagtttaaatccaa

SEQ ID NO: 68211 - DNA, 50 bp, synthetic construct
  source 1..50: mol_type = other DNA
ctattctttctttttcacctaaaatatttgagttcggacaactagaattt

SEQ ID NO: 68212 - DNA, 50 bp, synthetic construct
  source 1..50: mol_type = other DNA
aagaaaagatacctgcccttcggatatagatagcgcctttgctggagcct

SEQ ID NO: 68213 - DNA, 50 bp, synthetic construct
  source 1..50: mol_type = other DNA
ccatatccgccgggagaaatgcggaaagtgatatagcctaccggaaagga

SEQ ID NO: 68214 - DNA, 50 bp, synthetic construct
  source 1..50: mol_type = other DNA
aaagaacctcatcgtcccacctcccactctcctttacgatgaaaaatcac

SEQ ID NO: 68215 - DNA, 50 bp, synthetic construct
  source 1..50: mol_type = other DNA
gccggcggtcagctgaaaaaggcaaacagtggtatcaaggcttcgcaggc

SEQ ID NO: 68216 - DNA, 50 bp, synthetic construct
  source 1..50: mol_type = other DNA
ttcatctgaacctaatttgtatgaaaacattcctcagaatttccaatgaa

SEQ ID NO: 68217 - DNA, 50 bp, synthetic construct
  source 1..50: mol_type = other DNA
ctacaatgcctggtgctgttgcagaattattacagttctacaaattaaaa

SEQ ID NO: 68218 - DNA, 50 bp, synthetic construct
  source 1..50: mol_type = other DNA
cttatatatcactctaaaagctacttgccgctttttcttcccaataaact

SEQ ID NO: 68219 - DNA, 50 bp, synthetic construct
  source 1..50: mol_type = other DNA
tgatttaatgacatctatgtacaacaatttaagtagaggtttataatgtc

SEQ ID NO: 68220 - DNA, 50 bp, synthetic construct
  source 1..50: mol_type = other DNA
aataaaaagccgcctaaaatgggccgggccgttttatgctgctttccaag

SEQ ID NO: 68221 - DNA, 50 bp, synthetic construct
  source 1..50: mol_type = other DNA
ctttcaaagattgtgggcctatgctaaaatatcccaacaataggagaaat

SEQ ID NO: 68222 - DNA, 50 bp, synthetic construct
  source 1..50: mol_type = other DNA
ataataaaaataatttttaaatatttcattttcaagtgttaatttaagat

SEQ ID NO: 68223 - DNA, 50 bp, synthetic construct
  source 1..50: mol_type = other DNA
catcgctctccttgcagatgcagtggaggtacggcagcagatgagcgaac

SEQ ID NO: 68224 - DNA, 50 bp, synthetic construct
  source 1..50: mol_type = other DNA
cgagattttattgtaaaatcaaggatctgaaattttcttatgaaaaacaa

SEQ ID NO: 68225 - DNA, 50 bp, synthetic construct
  source 1..50: mol_type = other DNA
gcagcctttcagatacatcataaaaaggtcttaaaaatatgacttgctat

SEQ ID NO: 68226 - DNA, 50 bp, synthetic construct
  source 1..50: mol_type = other DNA
acgctgccattctcagtttctgtactgcttcttgccatgaatacagcaaa

SEQ ID NO: 68227 - DNA, 50 bp, synthetic construct
  source 1..50: mol_type = other DNA
ccttaaactcctgaatcctgctgaaagcaccagtgcaatcggtatgccgc

SEQ ID NO: 68228 - DNA, 50 bp, synthetic construct
  source 1..50: mol_type = other DNA
catgcgtagacctccagaaaataatcgatggaggtggattttccgaaaga

SEQ ID NO: 68229 - DNA, 50 bp, synthetic construct
  source 1..50: mol_type = other DNA
gaatgagatatcataactgttcatatctgaacaattatccgccgtcagtc

SEQ ID NO: 68230 - DNA, 50 bp, synthetic construct
  source 1..50: mol_type = other DNA
taattctattagatgatttattttatgtaataaatcatctatatatattt

SEQ ID NO: 68231 - DNA, 50 bp, synthetic construct
  source 1..50: mol_type = other DNA
gaggtatcagacatccaatgcttttaaggtgattgactgtctgattacaa

SEQ ID NO: 68232 - DNA, 50 bp, synthetic construct
  source 1..50: mol_type = other DNA
atgccaccttttccaaaattctgaaacccgttcacccaaaaaggtgtgcg

SEQ ID NO: 68233 - DNA, 50 bp, synthetic construct
  source 1..50: mol_type = other DNA
acagggaaaatttgctctgccttatatccggcgacacgtcttttccgtgt

SEQ ID NO: 68234 - DNA, 50 bp, synthetic construct
  source 1..50: mol_type = other DNA
agcgcaaggcctattaaaaaaaaatactcttttttgggaggtgggacgat

SEQ ID NO: 68235 - DNA, 50 bp, synthetic construct
  source 1..50: mol_type = other DNA
aaaatcacgatctaataatactgagaaatcgctggatatatcgtgttttt

SEQ ID NO: 68236 - DNA, 50 bp, synthetic construct
  source 1..50: mol_type = other DNA
acaataacatctgcgaggtctgttatccgggctccggtagatgtcgctgt

SEQ ID NO: 68237 - DNA, 50 bp, synthetic construct
  source 1..50: mol_type = other DNA
ttttgatttctccccatccctttatataaaggcaagcctcgaaaccatgc

SEQ ID NO: 68238 - DNA, 50 bp, synthetic construct
  source 1..50: mol_type = other DNA
cataatcacagtcctcctcattttttatcctgaggctggaggtatttatg

SEQ ID NO: 68239 - DNA, 50 bp, synthetic construct
  source 1..50: mol_type = other DNA
gcagaattccgagcgtccggtggacgttcacgatagttcatgcattctgc

SEQ ID NO: 68240 - DNA, 50 bp, synthetic construct
  source 1..50: mol_type = other DNA
tgccgattgaaagatacaaacgcctgagaacatatgtcgatatgtttgca

SEQ ID NO: 68241 - DNA, 50 bp, synthetic construct
  source 1..50: mol_type = other DNA
tgccagtgattgcgagatagacaatatatatactaccgcaagaggaggtg

SEQ ID NO: 68242 - DNA, 50 bp, synthetic construct
  source 1..50: mol_type = other DNA
ctttatggtaaaataatagcaagcagctttgctagatcttttcatcaagg

SEQ ID NO: 68243 - DNA, 50 bp, synthetic construct
  source 1..50: mol_type = other DNA
ggtctttggctaccgcatggagcttgacctgcatgatgtagcaggcgcgc

SEQ ID NO: 68244 - DNA, 50 bp, synthetic construct
  source 1..50: mol_type = other DNA
caaattccgccgcagcgcccccaccggccaatggctggaggcgtaggcag

SEQ ID NO: 68245 - DNA, 50 bp, synthetic construct
  source 1..50: mol_type = other DNA
tgctgctcggacaacatctgcaagcgaaggcgaaaagccgcaaagcggca

SEQ ID NO: 68246 - DNA, 50 bp, synthetic construct
  source 1..50: mol_type = other DNA
ttccagaaaagcctgtaaacacggtaccaaaagggggtgctttgatggaa

SEQ ID NO: 68247 - DNA, 50 bp, synthetic construct
  source 1..50: mol_type = other DNA
attcccattgctgcgcagaccaccgaggtggttatatggcaaatacagca

SEQ ID NO: 68248 - DNA, 50 bp, synthetic construct
  source 1..50: mol_type = other DNA
catttcctggccttctctgctataattaaatggtgaatctgtcggaacct

SEQ ID NO: 68249 - DNA, 50 bp, synthetic construct
  source 1..50: mol_type = other DNA
gaaatcgttattctgtgatgactgtagagtgatgaatatggtacgccaaa

SEQ ID NO: 68250 - DNA, 50 bp, synthetic construct
  source 1..50: mol_type = other DNA
ttgcaataaaaataaccagacttcatgctgtctgaactgttagattgtct

SEQ ID NO: 68251 - DNA, 50 bp, synthetic construct
  source 1..50: mol_type = other DNA
attacacatcagcatcttgatgttaaaacatcaattaagaaatatgaagc

SEQ ID NO: 68252 - DNA, 50 bp, synthetic construct
  source 1..50: mol_type = other DNA
ggaaatttgctttcttcttatgttaagaagaaaggagctggtgaataatg

SEQ ID NO: 68253 - DNA, 50 bp, synthetic construct
  source 1..50: mol_type = other DNA
atttgaccttgcagattttactctgctctgaccaatcagaaaggcggtgt

SEQ ID NO: 68254 - DNA, 50 bp, synthetic construct
  source 1..50: mol_type = other DNA
ttaacaattcccatttactaccggttaacgtcagcaatggacatcatttc

SEQ ID NO: 68255 - DNA, 50 bp, synthetic construct
  source 1..50: mol_type = other DNA
tggaaaacaaactgaaaaagctgaatactcttttttacatacattttcac

SEQ ID NO: 68256 - DNA, 50 bp, synthetic construct
  source 1..50: mol_type = other DNA
agcttattgtcaaacacttccgcacagatggaactgtttggacttcatga

SEQ ID NO: 68257 - DNA, 50 bp, synthetic construct
  source 1..50: mol_type = other DNA
tagcaagtacaatctgcgatacctttcaccatgaacatcttaccaagctg

SEQ ID NO: 68258 - DNA, 50 bp, synthetic construct
  source 1..50: mol_type = other DNA
actcattgcctccctgcgctcgtctgttacagaacttaacagcatagata

SEQ ID NO: 68259 - DNA, 50 bp, synthetic construct
  source 1..50: mol_type = other DNA
ccggtagtgtctatatatcactctaactgccgaaatgatcgacttatcaa

SEQ ID NO: 68260 - DNA, 50 bp, synthetic construct
  source 1..50: mol_type = other DNA
tcctatgggagtgtggtttgacttcgaatccctaccgggtcaccatttga

SEQ ID NO: 68261 - DNA, 50 bp, synthetic construct
  source 1..50: mol_type = other DNA
ccgataacagaacaggaaaagcgcaagggcttcgcccattccgaggataa

SEQ ID NO: 68262 - DNA, 50 bp, synthetic construct
  source 1..50: mol_type = other DNA
acaagctggaaaaattagttcttgatttattataccacaatcagccttgt

SEQ ID NO: 68263 - DNA, 50 bp, synthetic construct
  source 1..50: mol_type = other DNA
gccataacaaagcgtttttcatcaaagcctgagcgtcacactgttatttt

SEQ ID NO: 68264 - DNA, 50 bp, synthetic construct
  source 1..50: mol_type = other DNA
acatattacctcagtgtccgcgctatacaatcatcggtgatataatctgc

SEQ ID NO: 68265 - DNA, 50 bp, synthetic construct
  source 1..50: mol_type = other DNA
ccatttagaatttttaatacttccattcaagtattaacatttcaaatagg

SEQ ID NO: 68266 - DNA, 50 bp, synthetic construct
  source 1..50: mol_type = other DNA
ttacatatatcgctctaaaaaactttatttttttgttttagttaatgtac

SEQ ID NO: 68267 - DNA, 50 bp, synthetic construct
  source 1..50: mol_type = other DNA
gcttatgttataatcttattggttttttgcttgaagcgtgctttataagc

SEQ ID NO: 68268 - DNA, 50 bp, synthetic construct
  source 1..50: mol_type = other DNA
agtttattgggaagaaaaagcggcaagtagcttttagagtgatatataag

SEQ ID NO: 68269 - DNA, 50 bp, synthetic construct
  source 1..50: mol_type = other DNA
gccttgataatgcactccttggtgattcctcaagagcgcaaaagaaaggc

SEQ ID NO: 68270 - DNA, 50 bp, synthetic construct
  source 1..50: mol_type = other DNA
cacttcgcagaaaatggtgtccgtcagcggattgatggttgcgggtatca

SEQ ID NO: 68271 - DNA, 50 bp, synthetic construct
  source 1..50: mol_type = other DNA
gtggccggcactgtgcaatgccgcaggcgagatagctggacgccggaaat

SEQ ID NO: 68272 - DNA, 50 bp, synthetic construct
  source 1..50: mol_type = other DNA
ctgacatcctgtgtacctcttctttgccttttgcgttggatcgatataag

SEQ ID NO: 68273 - DNA, 50 bp, synthetic construct
  source 1..50: mol_type = other DNA
gcatctgccgaccggcgatatgtcgtggagacacgagcgtacccggctac

SEQ ID NO: 68274 - DNA, 50 bp, synthetic construct
  source 1..50: mol_type = other DNA
ttcatatacaaagacaagtaattggtcaagcactcgtccgctaacattaa

SEQ ID NO: 68275 - DNA, 50 bp, synthetic construct
  source 1..50: mol_type = other DNA
ggattgaatttgattttctgtaagtacacaagaatatcccccgccaaaac

SEQ ID NO: 68276 - DNA, 50 bp, synthetic construct
  source 1..50: mol_type = other DNA
gtgctgcatgaactgatgaaccataaatacggcatatcttcgtgtagtat

SEQ ID NO: 68277 - DNA, 50 bp, synthetic construct
  source 1..50: mol_type = other DNA
gcacctttctgccacctcattagtcttctaaaaagaaccatcaaaaagaa

SEQ ID NO: 68278 - DNA, 50 bp, synthetic construct
  source 1..50: mol_type = other DNA
gcctacacttttaattagtataggcattattactggctattataataatt

SEQ ID NO: 68279 - DNA, 50 bp, synthetic construct
  source 1..50: mol_type = other DNA
accctgttttttgaaaataaaaagttttttttatttacgaataaatgaat

SEQ ID NO: 68280 - DNA, 50 bp, synthetic construct
  source 1..50: mol_type = other DNA
taatttattaaaaaatagtatttctggaaatactatatttaagggtattt

SEQ ID NO: 68281 - DNA, 50 bp, synthetic construct
  source 1..50: mol_type = other DNA
gtagtaatcggcgatattactgatataataaaaggaggtccccatatggt

SEQ ID NO: 68282 - DNA, 50 bp, synthetic construct
  source 1..50: mol_type = other DNA
cttcatatcgttcgataagcataaggttattcgtcatatgattacggagc

SEQ ID NO: 68283 - DNA, 50 bp, synthetic construct
  source 1..50: mol_type = other DNA
gtacctctatatgccggatatatcaagagaggttctacatatagaggtac

SEQ ID NO: 68284 - DNA, 50 bp, synthetic construct
  source 1..50: mol_type = other DNA
atatatgtactctgcctgtctgattgtacacagtattttcgtacatattg

SEQ ID NO: 68285 - DNA, 50 bp, synthetic construct
  source 1..50: mol_type = other DNA
tcacttgtatatacatcactctaaatcaaatggcaattatgtgagagtga

SEQ ID NO: 68286 - DNA, 50 bp, synthetic construct
  source 1..50: mol_type = other DNA
atcaatacattcattgatattttcatttgtatatgcatgatattattgaa

SEQ ID NO: 68287 - DNA, 50 bp, synthetic construct
  source 1..50: mol_type = other DNA
gggcaatttccttgtttctcataatatcaagcgaagcacggtcaagccgt

SEQ ID NO: 68288 - DNA, 50 bp, synthetic construct
  source 1..50: mol_type = other DNA
aatcggccagcgggctgtttgcggtggtatagggcagccccgtggccttt

SEQ ID NO: 68289 - DNA, 50 bp, synthetic construct
  source 1..50: mol_type = other DNA
tgccttttcccataaatcttccgctggcgtataggttatgctaaaatctc

SEQ ID NO: 68290 - DNA, 50 bp, synthetic construct
  source 1..50: mol_type = other DNA
gaagtattgtagcagattgttgcaattacatatgatagagttaatgctta

SEQ ID NO: 68291 - DNA, 50 bp, synthetic construct
  source 1..50: mol_type = other DNA
aaagtatgccaccaacccgaactctggggtgcgagtggggagaaacgggg

SEQ ID NO: 68292 - DNA, 50 bp, synthetic construct
  source 1..50: mol_type = other DNA
tttaattgaataacaaaactcgatgcatcttgtttatcaaaagctataaa

SEQ ID NO: 68293 - DNA, 50 bp, synthetic construct
  source 1..50: mol_type = other DNA
gtattttcttatgagcctttttcttaaaaaaataaaataattccaaataa

SEQ ID NO: 68294 - DNA, 50 bp, synthetic construct
  source 1..50: mol_type = other DNA
attattggtttatttatcatgccaaataacttgataaataaaccttgtag

SEQ ID NO: 68295 - DNA, 50 bp, synthetic construct
  source 1..50: mol_type = other DNA
agccaaataaaaggctgttatttttttcaaagaatattatttatttgaaa

SEQ ID NO: 68296 - DNA, 50 bp, synthetic construct
  source 1..50: mol_type = other DNA
aaatgttatggacaacaaaagatagcaagggtttattttttatactcttt

SEQ ID NO: 68297 - DNA, 50 bp, synthetic construct
  source 1..50: mol_type = other DNA
acaaaattattattaaaattaaaacaatataatttacaagggatttttgc

SEQ ID NO: 68298 - DNA, 50 bp, synthetic construct
  source 1..50: mol_type = other DNA
agtaattataagtgcaaaggaatacgttcatattttcatttttaagtaag

SEQ ID NO: 68299 - DNA, 50 bp, synthetic construct
  source 1..50: mol_type = other DNA
gtacatttcaatggaaagacataaagcctcccaatgccaaagaaggaggc

SEQ ID NO: 68300 - DNA, 50 bp, synthetic construct
  source 1..50: mol_type = other DNA
gcccttgatgggtatttccaatgccggatttctgcaatgtcataaagggc

SEQ ID NO: 68301 - DNA, 50 bp, synthetic construct
  source 1..50: mol_type = other DNA
actgcacgagtttatgccgtattcctttgtactctgccaactcgtgagca

SEQ ID NO: 68302 - DNA, 50 bp, synthetic construct
  source 1..50: mol_type = other DNA
aaaccaaacatctcctttttttatttcggagaatgttatctgaactgttt

SEQ ID NO: 68303 - DNA, 50 bp, synthetic construct
  source 1..50: mol_type = other DNA
ccacattgtgatataattatacatataccgataattatacccttgaaacc

SEQ ID NO: 68304 - DNA, 50 bp, synthetic construct
  source 1..50: mol_type = other DNA
caatctgcgatacctttcacctttctttattaaattacacaacttttttg

SEQ ID NO: 68305 - DNA, 50 bp, synthetic construct
  source 1..50: mol_type = other DNA
gacggaaaccgaacaatccgagaacgttttcggttctggcggtagcggta

SEQ ID NO: 68306 - DNA, 50 bp, synthetic construct
  source 1..50: mol_type = other DNA
tatagtcttgaaaattaaaatattttaatatgtcaacactgaagagaggt

SEQ ID NO: 68307 - DNA, 50 bp, synthetic construct
  source 1..50: mol_type = other DNA
agcttggtggtgcccgtcagcttatgaaagctgatggccagaaaaaagaa

SEQ ID NO: 68308 - DNA, 50 bp, synthetic construct
  source 1..50: mol_type = other DNA
tattaacggaacgataggtattgctaatagtatttatcgtttgaataact

SEQ ID NO: 68309 - DNA, 50 bp, synthetic construct
  source 1..50: mol_type = other DNA
tttgcactatgcattcgattgaagaaatgaaagagaatgcaagaagaaag

SEQ ID NO: 68310 - DNA, 50 bp, synthetic construct
  source 1..50: mol_type = other DNA
ttcctttaatttcccgtccgcaggtgattgtatcgcggtcatataaggtg

SEQ ID NO: 68311 - DNA, 50 bp, synthetic construct
  source 1..50: mol_type = other DNA
actcatagcacaacctcctgtaaatattgtacacgactttctcgatcagc

SEQ ID NO: 68312 - DNA, 50 bp, synthetic construct
  source 1..50: mol_type = other DNA
ctgagtttatttatattggaactcatgaaagagaggtgtgataatgtcaa

SEQ ID NO: 68313 - DNA, 50 bp, synthetic construct
  source 1..50: mol_type = other DNA
ttttggatgcgcacaataagggaaattatggctattttttcgtggcaagt

SEQ ID NO: 68314 - DNA, 50 bp, synthetic construct
  source 1..50: mol_type = other DNA
taagttacaaaattagcatagcgtctccgctatgctcgtctgcgaacttt

SEQ ID NO: 68315 - DNA, 50 bp, synthetic construct
  source 1..50: mol_type = other DNA
tatgaaaagaaacgcaccgtcctcacaaggacggcgaaaagtgcatcagc

SEQ ID NO: 68316 - DNA, 50 bp, synthetic construct
  source 1..50: mol_type = other DNA
gcaaaacactattaacataccaatatattgaaatcaataatttgtgttgg

SEQ ID NO: 68317 - DNA, 50 bp, synthetic construct
  source 1..50: mol_type = other DNA
atgacaccagtgtattaaacgcttaaggaggacgaataatgacttgtacc

SEQ ID NO: 68318 - DNA, 50 bp, synthetic construct
  source 1..50: mol_type = other DNA
aaggacattgctatctaagcggacaggtgtacttttttagaaagtaacgg

SEQ ID NO: 68319 - DNA, 50 bp, synthetic construct
  source 1..50: mol_type = other DNA
ttcctcacaaaaaagaggaaggtcaataccttcctgttttcgttcaattt

SEQ ID NO: 68320 - DNA, 50 bp, synthetic construct
  source 1..50: mol_type = other DNA
ccggaagagttcgacaaagttcagacggatgaaatgaaagccgccgctgc

SEQ ID NO: 68321 - DNA, 50 bp, synthetic construct
  source 1..50: mol_type = other DNA
ccgtataaatgctccaaaagcacaagaaaacttctggagcagctgatcgg

SEQ ID NO: 68322 - DNA, 50 bp, synthetic construct
  source 1..50: mol_type = other DNA
ccatgaaaatcgcaaaactgttcggcgccacaaatccgacggcaccgtgg

SEQ ID NO: 68323 - DNA, 50 bp, synthetic construct
  source 1..50: mol_type = other DNA
ccttctggaagcgctgcggcagatcgtttttgtacagccaccttggaaag

SEQ ID NO: 68324 - DNA, 50 bp, synthetic construct
  source 1..50: mol_type = other DNA
tcgctgtcaacacctgtaagcattataatgaaaacagcaattttaagcct

SEQ ID NO: 68325 - DNA, 50 bp, synthetic construct
  source 1..50: mol_type = other DNA
cagcctactgccgtgtgtcaacggatccttcactacgaagatatcgaact

SEQ ID NO: 68326 - DNA, 50 bp, synthetic construct
  source 1..50: mol_type = other DNA
atacagacatattgatcattgatgatccttccagtctaagctgtctacat

SEQ ID NO: 68327 - DNA, 50 bp, synthetic construct
  source 1..50: mol_type = other DNA
attgctcaagcaagacaatcttcaatattgaattgataggaattagcttg

SEQ ID NO: 68328 - DNA, 50 bp, synthetic construct
  source 1..50: mol_type = other DNA
ataatgtgccgaaaacaggacggtataccgtcacaaaatccaccagactc

SEQ ID NO: 68329 - DNA, 50 bp, synthetic construct
  source 1..50: mol_type = other DNA
actcacgcacagaacgatttgtctgcggttggtggtatcaaaatgtgata

SEQ ID NO: 68330 - DNA, 50 bp, synthetic construct
  source 1..50: mol_type = other DNA
accggcgaaaaagtttcggaatctgtaaatatcgaatctttttcataccc

SEQ ID NO: 68331 - DNA, 50 bp, synthetic construct
  source 1..50: mol_type = other DNA
cagcgtgccaaaaaatccggtccggccggatgggaggttactatgtatca

SEQ ID NO: 68332 - DNA, 50 bp, synthetic construct
  source 1..50: mol_type = other DNA
ataaacatcaaactttgcgtttttatagtgtcggaaaggagtgatttcat

SEQ ID NO: 68333 - DNA, 50 bp, synthetic construct
  source 1..50: mol_type = other DNA
ttttgtcaatagctttttgaaagaaaaacgtggcaaaagtaacgacaata

SEQ ID NO: 68334 - DNA, 50 bp, synthetic construct
  source 1..50: mol_type = other DNA
tttatggaaatgtgcaatataaataaattcatataatattttttaataaa

SEQ ID NO: 68335 - DNA, 50 bp, synthetic construct
  source 1..50: mol_type = other DNA
aattaaggttaatcttgaaaatcgcttgattttgcaaggtggtattatgg

SEQ ID NO: 68336 - DNA, 50 bp, synthetic construct
  source 1..50: mol_type = other DNA
taaaatttcaccaataatattcaatatataataatgacacgttacttggg

SEQ ID NO: 68337 - DNA, 50 bp, synthetic construct
  source 1..50: mol_type = other DNA
cttgttgagaattatttgcttgataacataaaaaaggaaaggtgatatga

SEQ ID NO: 68338 - DNA, 50 bp, synthetic construct
  source 1..50: mol_type = other DNA
ttttctatacaaatttttcagataattgtggtgtaaatttgtattaaaaa

SEQ ID NO: 68339 - DNA, 50 bp, synthetic construct
  source 1..50: mol_type = other DNA
gaagaattatacaaaataaatggttttatgcttatttatgattattcttg

SEQ ID NO: 68340 - DNA, 50 bp, synthetic construct
  source 1..50: mol_type = other DNA
catgagatattcgtataaaagaaaaatctcaatagtccgagatggccatt

SEQ ID NO: 68341 - DNA, 50 bp, synthetic construct
  source 1..50: mol_type = other DNA
tcgccatgatgacctcctgcacggtgccatgcgcggcgtcatttatgcga

SEQ ID NO: 68342 - DNA, 50 bp, synthetic construct
  source 1..50: mol_type = other DNA
atctgtagcttgctttttcttccccaggaggtagcaggatgagtacagga

SEQ ID NO: 68343 - DNA, 50 bp, synthetic construct
  source 1..50: mol_type = other DNA
tgccatcttcattagtaaagctaaagaagttaaaagcatagaagatttat

SEQ ID NO: 68344 - DNA, 50 bp, synthetic construct
  source 1..50: mol_type = other DNA
cattgttgatggaaaagctgtaatcatttacagaattgatatctgggata

SEQ ID NO: 68345 - DNA, 50 bp, synthetic construct
  source 1..50: mol_type = other DNA
gagtgatttatataaacgcaaaaaattttttaaataaaaataaaaatcaa

SEQ ID NO: 68346 - DNA, 50 bp, synthetic construct
  source 1..50: mol_type = other DNA
ttatgcttattatcctgtggctctacagatcattcagaatataacccgtc

SEQ ID NO: 68347 - DNA, 50 bp, synthetic construct
  source 1..50: mol_type = other DNA
agttgctctggctactgtattgagaaatttaattgatacggagacttaca

SEQ ID NO: 68348 - DNA, 50 bp, synthetic construct
  source 1..50: mol_type = other DNA
cgtataaagcgttttgaattccatctatggcatatagtttatgctaaaat

SEQ ID NO: 68349 - DNA, 50 bp, synthetic construct
  source 1..50: mol_type = other DNA
attgctcagcggaaatctgggctacgatgccctaattcccgcacagccga

SEQ ID NO: 68350 - DNA, 50 bp, synthetic construct
  source 1..50: mol_type = other DNA
atgaaaaataattttttattattgtaccacaataaaaaaagccagcctat

SEQ ID NO: 68351 - DNA, 50 bp, synthetic construct
  source 1..50: mol_type = other DNA
gaagaaaagccaaaattatcaacaataactgttacttttggcattcttct

SEQ ID NO: 68352 - DNA, 50 bp, synthetic construct
  source 1..50: mol_type = other DNA
tttggaaaaacaatatatgataaaatttattctagtattgtttatattag

SEQ ID NO: 68353 - DNA, 50 bp, synthetic construct
  source 1..50: mol_type = other DNA
ttaccggggcagaccacaatttctatagaaagtgaggtttaaatgaatgg

SEQ ID NO: 68354 - DNA, 50 bp, synthetic construct
  source 1..50: mol_type = other DNA
gcttcatagagtaatcctaaccaatatttatagtgaatcatcaatgaatt

SEQ ID NO: 68355 - DNA, 50 bp, synthetic construct
  source 1..50: mol_type = other DNA
ggtgagaaatggcaagagctgtaacgtgacgcagtccgccatttcccacc

SEQ ID NO: 68356 - DNA, 50 bp, synthetic construct
  source 1..50: mol_type = other DNA
aaataaataatgtatttctctctttaaagttgcaaaagcattgtctgttt

SEQ ID NO: 68357 - DNA, 50 bp, synthetic construct
  source 1..50: mol_type = other DNA
caaacggtgaacttatgaaacacgtttttgaaatataagtaatgtgttta

SEQ ID NO: 68358 - DNA, 50 bp, synthetic construct
  source 1..50: mol_type = other DNA
cctgctggtgatataatcaaaattgcaatcttgctgtcaaacaccacgtc

SEQ ID NO: 68359 - DNA, 50 bp, synthetic construct
  source 1..50: mol_type = other DNA
atttattattttgaggagttaataattaaattttccataaaatttactcc

SEQ ID NO: 68360 - DNA, 50 bp, synthetic construct
  source 1..50: mol_type = other DNA
ggtaagccctttttccgccgtgagtttttatgcccaaaattcatagtatg

SEQ ID NO: 68361 - DNA, 50 bp, synthetic construct
  source 1..50: mol_type = other DNA
aagatttaatatatattaatagtgttagcttggaattacgattaaaaata

SEQ ID NO: 68362 - DNA, 50 bp, synthetic construct
  source 1..50: mol_type = other DNA
aatttttttgcgcttactttttgctaagaaaggatacagaaaaggaaatg

SEQ ID NO: 68363 - DNA, 50 bp, synthetic construct
  source 1..50: mol_type = other DNA
aaacaaattgtagttgtcatttgatagttgaaacatcttctaacatgttt

SEQ ID NO: 68364 - DNA, 50 bp, synthetic construct
  source 1..50: mol_type = other DNA
gtgcagcccgttgtggacgcttccgcttgccgctccacaacgttttccat

SEQ ID NO: 68365 - DNA, 50 bp, synthetic construct
  source 1..50: mol_type = other DNA
acattgccatcgcggggtgcaggggcagcaggtcagctcctccggggcca

SEQ ID NO: 68366 - DNA, 50 bp, synthetic construct
  source 1..50: mol_type = other DNA
ctgcccctaatgtatttgtctggaagtccacaagggcttattttttatac

SEQ ID NO: 68367 - DNA, 50 bp, synthetic construct
  source 1..50: mol_type = other DNA
gaatgactcaataaatgattcaacaaggagggtattaaattgagtcatgt

SEQ ID NO: 68368 - DNA, 50 bp, synthetic construct
  source 1..50: mol_type = other DNA
tacattttggggcaaacctctttttgaagccgagcttgcggcaaaagcgg

SEQ ID NO: 68369 - DNA, 50 bp, synthetic construct
  source 1..50: mol_type = other DNA
gttttcaaaattggttactcctttaaaaagacaaaagcaactttgaaacc

SEQ ID NO: 68370 - DNA, 50 bp, synthetic construct
  source 1..50: mol_type = other DNA
ttatatgatggcttcgaattataagcgaaaattggaaaacggaacggaaa

SEQ ID NO: 68371 - DNA, 50 bp, synthetic construct
  source 1..50: mol_type = other DNA
cccgggcagtttcatttacatgcatatcacgagcaaatagactggcagag

SEQ ID NO: 68372 - DNA, 50 bp, synthetic construct
  source 1..50: mol_type = other DNA
agatattaattttctcgactaactctgttggctctatagcattaataatt

SEQ ID NO: 68373 - DNA, 50 bp, synthetic construct
  source 1..50: mol_type = other DNA
agcggaatccgctatcagaaaatccggattttagcaatgcgatttccgac

SEQ ID NO: 68374 - DNA, 50 bp, synthetic construct
  source 1..50: mol_type = other DNA
ataatatcatgaaagcaatagaagcccgaaaatgtcttttatgatatgct

SEQ ID NO: 68375 - DNA, 50 bp, synthetic construct
  source 1..50: mol_type = other DNA
ggtatcttcaagttcctgcactctcttgaccgccgcgggcgcggcatttt

SEQ ID NO: 68376 - DNA, 50 bp, synthetic construct
  source 1..50: mol_type = other DNA
tatacgaactcataataacagtaaattatgtagtattgttggtttgcaaa

SEQ ID NO: 68377 - DNA, 50 bp, synthetic construct
  source 1..50: mol_type = other DNA
ttgccattcttatcatcctttctctgaatatttaattattataagctcta

SEQ ID NO: 68378 - DNA, 50 bp, synthetic construct
  source 1..50: mol_type = other DNA
tttaagaacagctcctcaccttcgttcaaagctgtggagctggtcttcct

SEQ ID NO: 68379 - DNA, 50 bp, synthetic construct
  source 1..50: mol_type = other DNA
aagtttgatacaaataatggtttataaaattcattttttaaaacaaaata

SEQ ID NO: 68380 - DNA, 50 bp, synthetic construct
  source 1..50: mol_type = other DNA
aattttttcataatcgccaagataatgtacttattcattattatataatt

SEQ ID NO: 68381 - DNA, 50 bp, synthetic construct
  source 1..50: mol_type = other DNA
ctataattttaactggaacatcttcaataaaaaagatattaattttatag

SEQ ID NO: 68382 - DNA, 50 bp, synthetic construct
  source 1..50: mol_type = other DNA
ttcgcaggcttcagaaacggctttgcaatgttattcttgcagccttgctt

SEQ ID NO: 68383 - DNA, 50 bp, synthetic construct
  source 1..50: mol_type = other DNA
gcccggaatagcaagtcattcagggccgttgaccacttgcgatggagcgg

SEQ ID NO: 68384 - DNA, 50 bp, synthetic construct
  source 1..50: mol_type = other DNA
caataatcacgctctcgagcggtaagtaccggaaaggagctgatttcatg

SEQ ID NO: 68385 - DNA, 50 bp, synthetic construct
  source 1..50: mol_type = other DNA
ttctttgaaattgtaggcatcacaaacgccatgccgaaaacgactaagaa

SEQ ID NO: 68386 - DNA, 50 bp, synthetic construct
  source 1..50: mol_type = other DNA
ataaattttagatttactattgaaaaataaatagaaaatagaaaagttgt

SEQ ID NO: 68387 - DNA, 50 bp, synthetic construct
  source 1..50: mol_type = other DNA
ggtgtttttctcttttcggatattttctggggcgaaaagagtgatgtata

SEQ ID NO: 68388 - DNA, 50 bp, synthetic construct
  source 1..50: mol_type = other DNA
atgttccggacggattgtaaatcgagccatttctgaaatccttggaacca

SEQ ID NO: 68389 - DNA, 50 bp, synthetic construct
  source 1..50: mol_type = other DNA
gaataaaaatgtacacttttgtaaaattgaaaaactgtgaatttgttttg

SEQ ID NO: 68390 - DNA, 50 bp, synthetic construct
  source 1..50: mol_type = other DNA
tcttgctccattcgttctcaactatataggaaagccggataacacaaaag

SEQ ID NO: 68391 - DNA, 50 bp, synthetic construct
  source 1..50: mol_type = other DNA
ttccataggaacgtccgaccaaaaatgttcttcctgacgtatgtttggtg

SEQ ID NO: 68392 - DNA, 50 bp, synthetic construct
  source 1..50: mol_type = other DNA
tttcctgtgaatctgcttgggctggatgcgccattatcattcatacaaat

SEQ ID NO: 68393 - DNA, 50 bp, synthetic construct
  source 1..50: mol_type = other DNA
ttgaaatcgtttttatcatagcgaatttgctttgataatgcaagttcttc

SEQ ID NO: 68394 - DNA, 50 bp, synthetic construct
  source 1..50: mol_type = other DNA
atgaagaagtaatcagccctgatccggatcaaacacacaggagaattttt

SEQ ID NO: 68395 - DNA, 50 bp, synthetic construct
  source 1..50: mol_type = other DNA
tactatcatatccaagggttaggagctataaggcctgttatataatcaat

SEQ ID NO: 68396 - DNA, 50 bp, synthetic construct
  source 1..50: mol_type = other DNA
tacatgaaatttcagatgaaaatcatggcagaagtggagcttatcaatgg

SEQ ID NO: 68397 - DNA, 50 bp, synthetic construct
  source 1..50: mol_type = other DNA
ggattatcaaaattttcagttatgctaaggtgttatatagctgataacct

SEQ ID NO: 68398 - DNA, 50 bp, synthetic construct
  source 1..50: mol_type = other DNA
cagatattctgcctgtttcataggattatgtgaaaaaggcatgtgcggtg

SEQ ID NO: 68399 - DNA, 50 bp, synthetic construct
  source 1..50: mol_type = other DNA
ttgccgcagcctttatacaatggggataatttttataaagctgtcggagt

SEQ ID NO: 68400 - DNA, 50 bp, synthetic construct
  source 1..50: mol_type = other DNA
caaattaacacaattgagcaaaaaattggttgcttggaggtgaaaatttg

SEQ ID NO: 68401 - DNA, 50 bp, synthetic construct
  source 1..50: mol_type = other DNA
tttttttctatttcttttgacttaattgctccaatagaaaaaataaaagt

SEQ ID NO: 68402 - DNA, 50 bp, synthetic construct
  source 1..50: mol_type = other DNA
aaaaatcaataaatccatgatatggtattactctgactttacccattttc

SEQ ID NO: 68403 - DNA, 50 bp, synthetic construct
  source 1..50: mol_type = other DNA
aaaaaggaatgaacagaacagcagcacggtcaatctgcttcttcgtttgg

SEQ ID NO: 68404 - DNA, 50 bp, synthetic construct
  source 1..50: mol_type = other DNA
ggagaaactgtgaaatatgaatgtaagcaatcatatttatggttgattcc

SEQ ID NO: 68405 - DNA, 50 bp, synthetic construct
  source 1..50: mol_type = other DNA
cctttcggatatgaagttgtgggcgggaacacatcttaccttccgaaagg

SEQ ID NO: 68406 - DNA, 50 bp, synthetic construct
  source 1..50: mol_type = other DNA
attatgttagtgtaaagtgaattggaatatcgtttttgcagtataatata

SEQ ID NO: 68407 - DNA, 50 bp, synthetic construct
  source 1..50: mol_type = other DNA
cggttttcctttgtacccctgggacaaaggagggatacaatgaaaaagac

SEQ ID NO: 68408 - DNA, 50 bp, synthetic construct
  source 1..50: mol_type = other DNA
taccacaaactttttaagtaaattgaaaggtacgcaagtcatgacaaata

SEQ ID NO: 68409 - DNA, 50 bp, synthetic construct
  source 1..50: mol_type = other DNA
actgcggtgactgcctgtttcagaaataagccgcaggaggttgacggcaa

SEQ ID NO: 68410 - DNA, 50 bp, synthetic construct
  source 1..50: mol_type = other DNA
gaaatatattgtgataatgcagaattgtctacattatttaccgatatccg

SEQ ID NO: 68411 - DNA, 50 bp, synthetic construct
  source 1..50: mol_type = other DNA
cggatttgaaataaaaacgagataaatagagttttattataagaaaggcg

SEQ ID NO: 68412 - DNA, 50 bp, synthetic construct
  source 1..50: mol_type = other DNA
atcttgtttctttttttatgtattgttggacaagaaaagggaagcaagat

SEQ ID NO: 68413 - DNA, 50 bp, synthetic construct
  source 1..50: mol_type = other DNA
ttactggggttttcttatacgttgtacaacactacccaaaaacaacaccc

SEQ ID NO: 68414 - DNA, 50 bp, synthetic construct
  source 1..50: mol_type = other DNA
tttaaagaagcaagaccatagccaagtgccattctcatttccattttccc

SEQ ID NO: 68415 - DNA, 50 bp, synthetic construct
  source 1..50: mol_type = other DNA
tttctcggtttttatcaagtcatttgaagattcctttcgcacgttgaaat

SEQ ID NO: 68416 - DNA, 50 bp, synthetic construct
  source 1..50: mol_type = other DNA
agttttttgtagttaccttttgtataacttagtgctatctagggagaaca

SEQ ID NO: 68417 - DNA, 50 bp, synthetic construct
  source 1..50: mol_type = other DNA
aattttagttattttttcagccatttatgaatgatgtaataaataaaatt

SEQ ID NO: 68418 - DNA, 50 bp, synthetic construct
  source 1..50: mol_type = other DNA
actgaatggaatacatgccaatcgaacatttgcgataatctccattcaaa

SEQ ID NO: 68419 - DNA, 50 bp, synthetic construct
  source 1..50: mol_type = other DNA
atgccgtttatatctatgacgacaaaatcaaaaaattttcacaaaggtat

SEQ ID NO: 68420 - DNA, 50 bp, synthetic construct
  source 1..50: mol_type = other DNA
ttttttttctttttctaattcttttacaagaattagaaaaattagaaaaa

SEQ ID NO: 68421 - DNA, 50 bp, synthetic construct
  source 1..50: mol_type = other DNA
cttaccttcttcatggtttcgctcattccgcaggcaaataagaagagaag

SEQ ID NO: 68422 - DNA, 50 bp, synthetic construct
  source 1..50: mol_type = other DNA
ccgaacagctaatcaattatcgcaggccacccggcgctttttctgttcgg

SEQ ID NO: 68423 - DNA, 50 bp, synthetic construct
  source 1..50: mol_type = other DNA
atatcatatcacctttccttttttatgatggacgaacacccggtaccgca

SEQ ID NO: 68424 - DNA, 50 bp, synthetic construct
  source 1..50: mol_type = other DNA
agaaatcaatccatataagctgaaattacaggaggtacaagactatgaca

SEQ ID NO: 68425 - DNA, 50 bp, synthetic construct
  source 1..50: mol_type = other DNA
cattcaagcgcgctaccaaaactgcgcaacgtactttcccttcctgccct

SEQ ID NO: 68426 - DNA, 50 bp, synthetic construct
  source 1..50: mol_type = other DNA
aatatatattcgcattctttacccttggttaaaaaagagggatatatagt

SEQ ID NO: 68427 - DNA, 50 bp, synthetic construct
  source 1..50: mol_type = other DNA
aaaatgaaattttgatttatcccgtacaggataacgaaacattgctgttt

SEQ ID NO: 68428 - DNA, 50 bp, synthetic construct
  source 1..50: mol_type = other DNA
tcagggcgtattcgacgattccctggctgagttgtccgattcagccttac

SEQ ID NO: 68429 - DNA, 50 bp, synthetic construct
  source 1..50: mol_type = other DNA
tgaaattcgaaaaaatgaaagaaatatctcttaaatatcttttaatttct

SEQ ID NO: 68430 - DNA, 50 bp, synthetic construct
  source 1..50: mol_type = other DNA
tgaaatatatgtaatatctgtttgacagtaggattattacattttttagt

SEQ ID NO: 68431 - DNA, 50 bp, synthetic construct
  source 1..50: mol_type = other DNA
ttaactgcaagaggctattttgtcaaaacaccgcaattgcttgcgatgcc

SEQ ID NO: 68432 - DNA, 50 bp, synthetic construct
  source 1..50: mol_type = other DNA
attttctgtgacgaatcttaagcagaaattggagattcagataagggaag

SEQ ID NO: 68433 - DNA, 50 bp, synthetic construct
  source 1..50: mol_type = other DNA
ggaaaatccattctgttcacaggcgaaaggatgataagaatggcaagaag

SEQ ID NO: 68434 - DNA, 50 bp, synthetic construct
  source 1..50: mol_type = other DNA
gccttgtaataaactggctcagtgatactcctgagttatttaaagaatca

SEQ ID NO: 68435 - DNA, 50 bp, synthetic construct
  source 1..50: mol_type = other DNA
cggcgtggactatgaggaactgcgggatttattctgacgcttccacggcg

SEQ ID NO: 68436 - DNA, 50 bp, synthetic construct
  source 1..50: mol_type = other DNA
tgcgaaatcgaaatccggcagtggcgcgtcagctggtacacgatagcgga

SEQ ID NO: 68437 - DNA, 50 bp, synthetic construct
  source 1..50: mol_type = other DNA
tcttactccctctatatcataatcaagtttatgatgtagaggatggaaaa

SEQ ID NO: 68438 - DNA, 50 bp, synthetic construct
  source 1..50: mol_type = other DNA
aaaaatatatcatactaattatagaaatacttcttctaaactagattttt

SEQ ID NO: 68439 - DNA, 50 bp, synthetic construct
  source 1..50: mol_type = other DNA
tgcagttattgatagaaaagccacagcatactgaattatcaataaaataa

SEQ ID NO: 68440 - DNA, 50 bp, synthetic construct
  source 1..50: mol_type = other DNA
ttgattttttctatcacctgaataatatttcagaatattatgataatcca

SEQ ID NO: 68441 - DNA, 50 bp, synthetic construct
  source 1..50: mol_type = other DNA
tccgatataaagccccagttttaggcgtagagaagaacatggtcatcgga

SEQ ID NO: 68442 - DNA, 50 bp, synthetic construct
  source 1..50: mol_type = other DNA
cacattcagtatcagcagatgtaagcttattcttgctgatgagccgacag

SEQ ID NO: 68443 - DNA, 50 bp, synthetic construct
  source 1..50: mol_type = other DNA
cagcatatcgcgatttggcgcgaatcatagcatttcttcgcgatatgctg

SEQ ID NO: 68444 - DNA, 50 bp, synthetic construct
  source 1..50: mol_type = other DNA
caaccgtaacataagccgggaaaggctgatttactatattattataccat

SEQ ID NO: 68445 - DNA, 50 bp, synthetic construct
  source 1..50: mol_type = other DNA
tattatattgacatattttccgaaagatgtcaaaatatgatgtcataaat

SEQ ID NO: 68446 - DNA, 50 bp, synthetic construct
  source 1..50: mol_type = other DNA
tgcgaagctgattcatggtctggatgtaaactctacgaataaattttaca

SEQ ID NO: 68447 - DNA, 50 bp, synthetic construct
  source 1..50: mol_type = other DNA
caagtttttatttactaactaaaaattttcaatagtaaattaaaaattta

SEQ ID NO: 68448 - DNA, 50 bp, synthetic construct
  source 1..50: mol_type = other DNA
tgttgtaccaattgaacactacccgtgggctgtgttaagttagtacaaaa

SEQ ID NO: 68449 - DNA, 50 bp, synthetic construct
  source 1..50: mol_type = other DNA
gcgcgctgcatgaagtaccccgttcatgccgtatacttcatagcagtccg

SEQ ID NO: 68450 - DNA, 50 bp, synthetic construct
  source 1..50: mol_type = other DNA
aatagtagtgattatacagatgaatttttatgagtatattacaaactatt

SEQ ID NO: 68451 - DNA, 50 bp, synthetic construct
  source 1..50: mol_type = other DNA
tttcggagcataatgtgccgaaaagggagtcggcagtttccgctccgtca

SEQ ID NO: 68452 - DNA, 50 bp, synthetic construct
  source 1..50: mol_type = other DNA
tggaaacgctaaatctgccagcagtttttctggcagaagccgaccatgga

SEQ ID NO: 68453 - DNA, 50 bp, synthetic construct
  source 1..50: mol_type = other DNA
agcatcccgcctgtttcctgaaatatatcggaaaggagcttattgatgga

SEQ ID NO: 68454 - DNA, 50 bp, synthetic construct
  source 1..50: mol_type = other DNA
gaaatcttttgaggaactgcttgatgtcaaggagtgataaaaaatatgca

SEQ ID NO: 68455 - DNA, 50 bp, synthetic construct
  source 1..50: mol_type = other DNA
ccccaaatttgtcctataatcgttttaaagattttttgacaaacactggt

SEQ ID NO: 68456 - DNA, 50 bp, synthetic construct
  source 1..50: mol_type = other DNA
accatatatcactctgtttgatacaataatcaacctgagccgcatagctg

SEQ ID NO: 68457 - DNA, 50 bp, synthetic construct
  source 1..50: mol_type = other DNA
tgttgtactaactataacgcacctacaggagcgtgtaagatagtacaaca

SEQ ID NO: 68458 - DNA, 50 bp, synthetic construct
  source 1..50: mol_type = other DNA
gtgtttggcatactgcgaacaaaaatttctgtaatgagtatttgaaaatg

SEQ ID NO: 68459 - DNA, 50 bp, synthetic construct
  source 1..50: mol_type = other DNA
tcatatcaagcggtttttctgttatatttcggagaatacactggatatcg

SEQ ID NO: 68460 - DNA, 50 bp, synthetic construct
  source 1..50: mol_type = other DNA
ccaatcattacgccggaagagttcgagaccgctcaaggcgtgagagttgg

SEQ ID NO: 68461 - DNA, 50 bp, synthetic construct
  source 1..50: mol_type = other DNA
aaatcgaggcgtgagtcccaagaaaaaactgcacgatcacctttgttttc

SEQ ID NO: 68462 - DNA, 50 bp, synthetic construct
  source 1..50: mol_type = other DNA
gtcagagtaatacctagtacattaaattatgtaaaaagtattgagattag

SEQ ID NO: 68463 - DNA, 50 bp, synthetic construct
  source 1..50: mol_type = other DNA
tattaacaaaaagccctgttttatggtacagtcaataaaatctgccaccc

SEQ ID NO: 68464 - DNA, 50 bp, synthetic construct
  source 1..50: mol_type = other DNA
gcttttcacattaaggacatcaacgatgttgcggccttaaaagacagcaa

SEQ ID NO: 68465 - DNA, 50 bp, synthetic construct
  source 1..50: mol_type = other DNA
ttgtgtttcttttatacttttatctttttatgagtatattacaaactatt

SEQ ID NO: 68466 - DNA, 50 bp, synthetic construct
  source 1..50: mol_type = other DNA
gatagaggtattatttgaggatgaggagggctgtgattatgtttattaag

SEQ ID NO: 68467 - DNA, 50 bp, synthetic construct
  source 1..50: mol_type = other DNA
gcgctccgcttccctaccgaagcgtggcgcagcacctcggccaccgccgc

SEQ ID NO: 68468 - DNA, 50 bp, synthetic construct
  source 1..50: mol_type = other DNA
cagctgtgcgcaggcttcttgataattatattaccacctgcggacgggaa

SEQ ID NO: 68469 - DNA, 50 bp, synthetic construct
  source 1..50: mol_type = other DNA
cggctggcgcagcctggacggggcgcgcttgaatggggttcaagaggccg

SEQ ID NO: 68470 - DNA, 50 bp, synthetic construct
  source 1..50: mol_type = other DNA
gaatgggaaagactagaaagaaagccttttcttttacacttttccgtgta

SEQ ID NO: 68471 - DNA, 50 bp, synthetic construct
  source 1..50: mol_type = other DNA
ttttatttttaaattctaattgtgcacacaagaagaattcgaaaaaaaga

SEQ ID NO: 68472 - DNA, 50 bp, synthetic construct
  source 1..50: mol_type = other DNA
gatataaccatggaaaagctcgtagcttccagctttttcagtatttcttc

SEQ ID NO: 68473 - DNA, 50 bp, synthetic construct
  source 1..50: mol_type = other DNA
tcggcagagaactgccacttcttttcaaaaggtcaggggttcgaatcccc

SEQ ID NO: 68474 - DNA, 50 bp, synthetic construct
  source 1..50: mol_type = other DNA
tggaagccacgtttcggtatcatctacaggataacgaaacattgctgttt

SEQ ID NO: 68475 - DNA, 50 bp, synthetic construct
  source 1..50: mol_type = other DNA
atcaggcaggccaggatatgcgcgggcgtgcgcatggccgcccgcagctc

SEQ ID NO: 68476 - DNA, 50 bp, synthetic construct
  source 1..50: mol_type = other DNA
tcacaagtttatatacatggtgcaattgcattggccatattaaagtctga

SEQ ID NO: 68477 - DNA, 50 bp, synthetic construct
  source 1..50: mol_type = other DNA
ttattatactctaaatcttgtgttttatcaaaaaatttagcctcatcgca

SEQ ID NO: 68478 - DNA, 50 bp, synthetic construct
  source 1..50: mol_type = other DNA
tttataaaccttagtggtgagatatgcatatcaattagaattattagcaa

SEQ ID NO: 68479 - DNA, 50 bp, synthetic construct
  source 1..50: mol_type = other DNA
acttccggtgatcggtacagtatttgaattatgaaccgatatggaaaacg

SEQ ID NO: 68480 - DNA, 50 bp, synthetic construct
  source 1..50: mol_type = other DNA
cttcatgcgcttcacctccgtttctggctgggagggtttagtgcatttat

SEQ ID NO: 68481 - DNA, 50 bp, synthetic construct
  source 1..50: mol_type = other DNA
tttttcatgataactcacctcccattgcggaggtgattctgaatggagaa

SEQ ID NO: 68482 - DNA, 50 bp, synthetic construct
  source 1..50: mol_type = other DNA
accgtatgtcagtcggctcataaggaaatataagcctgttttcggcacat

SEQ ID NO: 68483 - DNA, 50 bp, synthetic construct
  source 1..50: mol_type = other DNA
cgggtgtctttttttcgttaaggggtcactctgggaaaaaaagaaaataa

SEQ ID NO: 68484 - DNA, 50 bp, synthetic construct
  source 1..50: mol_type = other DNA
gtagataaagaataacttcctattaaatacagaagacataaaaaacaacc

SEQ ID NO: 68485 - DNA, 50 bp, synthetic construct
  source 1..50: mol_type = other DNA
acaaaaacatatatcctccaatcataaacacggaggttatatcaaaatga

SEQ ID NO: 68486 - DNA, 50 bp, synthetic construct
  source 1..50: mol_type = other DNA
gtgaaactttaatcccacccaaagcacttagtaactctatttttattttt

SEQ ID NO: 68487 - DNA, 50 bp, synthetic construct
  source 1..50: mol_type = other DNA
atcagagatcgtcctcttcggcttcggaatcgaagaagatgatctgcttg

SEQ ID NO: 68488 - DNA, 50 bp, synthetic construct
  source 1..50: mol_type = other DNA
aaatctgacgttctttccactctatcaaggctggaaaccaatgtcgattt

SEQ ID NO: 68489 - DNA, 50 bp, synthetic construct
  source 1..50: mol_type = other DNA
acaaaaagtacggcttatgttataattatctcaatatcttcatcatttga

SEQ ID NO: 68490 - DNA, 50 bp, synthetic construct
  source 1..50: mol_type = other DNA
ttgacggcaaaacccaagcaggaatttggaaagaccgctcacgcagtcaa

SEQ ID NO: 68491 - DNA, 50 bp, synthetic construct
  source 1..50: mol_type = other DNA
aaagctgatttttgcttttttccatagggaaaaaaacaacgtccccattt

SEQ ID NO: 68492 - DNA, 50 bp, synthetic construct
  source 1..50: mol_type = other DNA
aaagctcaaatctttgtcagtacaccactattgacaaaaagatgagcttt

SEQ ID NO: 68493 - DNA, 50 bp, synthetic construct
  source 1..50: mol_type = other DNA
acttcccattgtgatataggaaatataaaaactatattgtactgccaagt

SEQ ID NO: 68494 - DNA, 50 bp, synthetic construct
  source 1..50: mol_type = other DNA
atttaacgaatctgcaggaaggcagaaggaagtgattatatgccgaaaat

SEQ ID NO: 68495 - DNA, 50 bp, synthetic construct
  source 1..50: mol_type = other DNA
tcggaaatacaggtataaaacaggatttggttctatataaatatgtttga

SEQ ID NO: 68496 - DNA, 50 bp, synthetic construct
  source 1..50: mol_type = other DNA
ttgcattgtctattgcagactctatttagagtgatgtatagacgtacgga

SEQ ID NO: 68497 - DNA, 50 bp, synthetic construct
  source 1..50: mol_type = other DNA
actaaaataggtatattcggaagtcaggtacccaatattccgattttctt

SEQ ID NO: 68498 - DNA, 50 bp, synthetic construct
  source 1..50: mol_type = other DNA
ccttgtaatgatttctatctctgctttcacgtatagtttctaccccaaga

SEQ ID NO: 68499 - DNA, 50 bp, synthetic construct
  source 1..50: mol_type = other DNA
ggctttctcacagttttctttggtgaatgtttgcaaacacaaaaaaagcc

SEQ ID NO: 68500 - DNA, 50 bp, synthetic construct
  source 1..50: mol_type = other DNA
aatagttgacctgcgaagcaaaggaatatttccttcattcatctgatatc

SEQ ID NO: 68501 - DNA, 50 bp, synthetic construct
  source 1..50: mol_type = other DNA
atacaggtataaaactggacagagatccctgtcggtgtgtatacgattat

SEQ ID NO: 68502 - DNA, 50 bp, synthetic construct
  source 1..50: mol_type = other DNA
atttactacctcagcagattgatttctatctgcctgttgaggtggtaaca

SEQ ID NO: 68503 - DNA, 50 bp, synthetic construct
  source 1..50: mol_type = other DNA
ctgttttaggcataaaaagagcctccttccttcttttattttctggactt

SEQ ID NO: 68504 - DNA, 50 bp, synthetic construct
  source 1..50: mol_type = other DNA
gcacagattcgacttatttttcaaaaatgaaaaataacaggaggattttt

SEQ ID NO: 68505 - DNA, 50 bp, synthetic construct
  source 1..50: mol_type = other DNA
atggcatgacagttcgattcggttaataaggagtaatgcaacaatgccaa

SEQ ID NO: 68506 - DNA, 50 bp, synthetic construct
  source 1..50: mol_type = other DNA
agccttgccagccgccccatcaaagttttggtagcgcgcttgaatggggt

SEQ ID NO: 68507 - DNA, 50 bp, synthetic construct
  source 1..50: mol_type = other DNA
atctaaaaaatttaataatacatcatgagttatgtttatgagaattgtat

SEQ ID NO: 68508 - DNA, 50 bp, synthetic construct
  source 1..50: mol_type = other DNA
ttgtttttatgatttttttgggcctatttgtatcaaacttatacgtcaaa

SEQ ID NO: 68509 - DNA, 50 bp, synthetic construct
  source 1..50: mol_type = other DNA
taagatattaaagattagagtcattaattaatctagtatgcaatgatcaa

SEQ ID NO: 68510 - DNA, 50 bp, synthetic construct
  source 1..50: mol_type = other DNA
cgcataaaaaaagccttgatgatatcaagtatcttgatttactttataat

SEQ ID NO: 68511 - DNA, 50 bp, synthetic construct
  source 1..50: mol_type = other DNA
aaaattcatctcgctgccttcgactcatttttacggaaaggatgatattt

SEQ ID NO: 68512 - DNA, 50 bp, synthetic construct
  source 1..50: mol_type = other DNA
atgtggcggataaccaatctgagcggactctttgagtttatccagtgggt

SEQ ID NO: 68513 - DNA, 50 bp, synthetic construct
  source 1..50: mol_type = other DNA
gtatttttgatttcaaaacatcagaagggatggggagaaatcaaaaaaga

SEQ ID NO: 68514 - DNA, 50 bp, synthetic construct
  source 1..50: mol_type = other DNA
gctgaatttatggctgagcatctgaaaggatgatcagcagaaagaccagt

SEQ ID NO: 68515 - DNA, 50 bp, synthetic construct
  source 1..50: mol_type = other DNA
ccgaataagcggggtcgtgaactgatcaagttaaaccatactttattcag

SEQ ID NO: 68516 - DNA, 50 bp, synthetic construct
  source 1..50: mol_type = other DNA
ctatgcttattatcctgtggctctacagatcattcagaatataacccgtc

SEQ ID NO: 68517 - DNA, 50 bp, synthetic construct
  source 1..50: mol_type = other DNA
tcatataaaaaagctcctttcacgaaaagaaaaagaagcttttaagattg

SEQ ID NO: 68518 - DNA, 50 bp, synthetic construct
  source 1..50: mol_type = other DNA
cagcctttttattaaagtggacatatttgtccacttattttattattaat

SEQ ID NO: 68519 - DNA, 50 bp, synthetic construct
  source 1..50: mol_type = other DNA
ttcgatagccaagcggaataccgccggttcgaatccgctatgctccacca

SEQ ID NO: 68520 - DNA, 50 bp, synthetic construct
  source 1..50: mol_type = other DNA
gcctgttttcaacttatctttgagctgtcttaatcaatgaaaaaatgacc

SEQ ID NO: 68521 - DNA, 50 bp, synthetic construct
  source 1..50: mol_type = other DNA
ataaaaaatttgtcccaccctttttagaaagtctggaaggtatgtttttt

SEQ ID NO: 68522 - DNA, 50 bp, synthetic construct
  source 1..50: mol_type = other DNA
atatatttcttacggaaacaaaaatattattggctttcagagtgatatat

SEQ ID NO: 68523 - DNA, 50 bp, synthetic construct
  source 1..50: mol_type = other DNA
catccggtcagcatcgtcctgttccggatgttagtctggcgtttaccaat

SEQ ID NO: 68524 - DNA, 50 bp, synthetic construct
  source 1..50: mol_type = other DNA
tcaataatacttttttgcaaactagttggtttgcaaaaatcgtatgaaag

SEQ ID NO: 68525 - DNA, 50 bp, synthetic construct
  source 1..50: mol_type = other DNA
caaggtttatttatcaagttattcaagaatatctttgtagataaagaatc

SEQ ID NO: 68526 - DNA, 50 bp, synthetic construct
  source 1..50: mol_type = other DNA
gaacctgtttcaacctttgaggcaataatatcggaggtaaaattttatga

SEQ ID NO: 68527 - DNA, 50 bp, synthetic construct
  source 1..50: mol_type = other DNA
tgtactctgcctgtctgattggattaaggagatgtgacaatggatataca

SEQ ID NO: 68528 - DNA, 50 bp, synthetic construct
  source 1..50: mol_type = other DNA
acaaactttgaaaagtcataatttattaagtatcttatttctttagttgt

SEQ ID NO: 68529 - DNA, 50 bp, synthetic construct
  source 1..50: mol_type = other DNA
tatatccgaggtgtgattttgtgcttttcggcacattattctcggatata

SEQ ID NO: 68530 - DNA, 50 bp, synthetic construct
  source 1..50: mol_type = other DNA
aacgcagttttctttgctttttgttcgaacacggcaaagataatgtctcc

SEQ ID NO: 68531 - DNA, 50 bp, synthetic construct
  source 1..50: mol_type = other DNA
agtttatattatttttttctaaccatatgtaaaaccgccaccttagaact

SEQ ID NO: 68532 - DNA, 50 bp, synthetic construct
  source 1..50: mol_type = other DNA
acatacaccctttggatacatcattgtctctttatgcaaatggtggaaat

SEQ ID NO: 68533 - DNA, 50 bp, synthetic construct
  source 1..50: mol_type = other DNA
ttgatttttatttttatttaaaaaattttttgcgtttatataaatcactc

SEQ ID NO: 68534 - DNA, 50 bp, synthetic construct
  source 1..50: mol_type = other DNA
tgtcaccgtcccttaacggtgtcttcctgatccgttgatacacggcagta

SEQ ID NO: 68535 - DNA, 50 bp, synthetic construct
  source 1..50: mol_type = other DNA
gaaaaagctatcgaagcgaaatctccacaacgggtataagtcagtttttc

SEQ ID NO: 68536 - DNA, 50 bp, synthetic construct
  source 1..50: mol_type = other DNA
gcggatttatcggaaacgctgtaaaatacgtaaatttccggaacatccgc

SEQ ID NO: 68537 - DNA, 50 bp, synthetic construct
  source 1..50: mol_type = other DNA
ctttaacatgttatccggtcgcgtaaacggcggcgggcagattgattggt

SEQ ID NO: 68538 - DNA, 50 bp, synthetic construct
  source 1..50: mol_type = other DNA
atcaaaaaagcatcaatcacaagtcacgccgttttcaatgctacatttat

SEQ ID NO: 68539 - DNA, 50 bp, synthetic construct
  source 1..50: mol_type = other DNA
tccacgagctccggctcctgcgcccgtctggaagaacagggcattttgaa

SEQ ID NO: 68540 - DNA, 50 bp, synthetic construct
  source 1..50: mol_type = other DNA
gggtggcaggactcagcagaaaacgattccatgactttgtatgagcgccg

SEQ ID NO: 68541 - DNA, 50 bp, synthetic construct
  source 1..50: mol_type = other DNA
tgatcctacatctggaatacgagggagtccgtattcccgatgaaattata

SEQ ID NO: 68542 - DNA, 50 bp, synthetic construct
  source 1..50: mol_type = other DNA
tctatttgagaaagtctcgtgcagatctgcattcgtttatctccctgata

SEQ ID NO: 68543 - DNA, 50 bp, synthetic construct
  source 1..50: mol_type = other DNA
aggtgaaacccagagcgtagacactattatcagtcctcttttctgtctaa

SEQ ID NO: 68544 - DNA, 50 bp, synthetic construct
  source 1..50: mol_type = other DNA
tattgaaagtagcttctttgattccataatcaggatttcttgttatgatt

SEQ ID NO: 68545 - DNA, 50 bp, synthetic construct
  source 1..50: mol_type = other DNA
acgtttactaacacactataacccgtcggttatagtgtgttagtaaacaa

SEQ ID NO: 68546 - DNA, 50 bp, synthetic construct
  source 1..50: mol_type = other DNA
tcaaggatgattccagaacattttgaaaaatgttctcgaaaagaaataat

SEQ ID NO: 68547 - DNA, 50 bp, synthetic construct
  source 1..50: mol_type = other DNA
acagaaaaataattttaggagcataactttttataaaaagttttatcttt

SEQ ID NO: 68548 - DNA, 50 bp, synthetic construct
  source 1..50: mol_type = other DNA
atattgttggaatgattatcctggctgcacttttttcatgacaacttcac

SEQ ID NO: 68549 - DNA, 50 bp, synthetic construct
  source 1..50: mol_type = other DNA
gtagatattcagaatcagaaacagatctggctgtgaataccaatgcctac

SEQ ID NO: 68550 - DNA, 50 bp, synthetic construct
  source 1..50: mol_type = other DNA
caaagattggtggagacgaagaggatcctcttctaaaaaaataacacgaa

SEQ ID NO: 68551 - DNA, 50 bp, synthetic construct
  source 1..50: mol_type = other DNA
atcttttctggttacaaatgtacgatcgtacatttgtaatcggaaactgt

SEQ ID NO: 68552 - DNA, 50 bp, synthetic construct
  source 1..50: mol_type = other DNA
tacagacacatacaactactatctggagaattaaaccgtttgtttctgta

SEQ ID NO: 68553 - DNA, 50 bp, synthetic construct
  source 1..50: mol_type = other DNA
tagatctctatctgaagcagaattgacgttctgcgtcaattatcgctggg

SEQ ID NO: 68554 - DNA, 50 bp, synthetic construct
  source 1..50: mol_type = other DNA
tttttttccaaattaaaaacctccattttaattttatagagaaatataaa

SEQ ID NO: 68555 - DNA, 50 bp, synthetic construct
  source 1..50: mol_type = other DNA
ataaaggtttccgtataaactattcgaaaagaaggcatacagacttgcat

SEQ ID NO: 68556 - DNA, 50 bp, synthetic construct
  source 1..50: mol_type = other DNA
tttcggctctcttttttggctgtgagtacgccacaaccagagagcacccg

SEQ ID NO: 68557 - DNA, 50 bp, synthetic construct
  source 1..50: mol_type = other DNA
caataactcctgagtacatttcactttagtaattggattaatcgttgatg

SEQ ID NO: 68558 - DNA, 50 bp, synthetic construct
  source 1..50: mol_type = other DNA
tcttataagttctttaccttcatccaaatgatgaatttgtggaaataaga

SEQ ID NO: 68559 - DNA, 50 bp, synthetic construct
  source 1..50: mol_type = other DNA
gtttactaagttaagtaatccgttcaaaacaatcccctgacttggtaaaa

SEQ ID NO: 68560 - DNA, 50 bp, synthetic construct
  source 1..50: mol_type = other DNA
gggttgcatctgcgcccagccatgtttatggcacgggtcagcaggtcatt

SEQ ID NO: 68561 - DNA, 50 bp, synthetic construct
  source 1..50: mol_type = other DNA
cctgctgtgggataacaacacctacggacgatagattggaacacagcagt

SEQ ID NO: 68562 - DNA, 50 bp, synthetic construct
  source 1..50: mol_type = other DNA
gctatgcccccataacaataaaaattttttactgcttcagtatcaatttc

SEQ ID NO: 68563 - DNA, 50 bp, synthetic construct
  source 1..50: mol_type = other DNA
tctctttaagtgtgctcttaattacatgatttagtactattttaaggagg

SEQ ID NO: 68564 - DNA, 50 bp, synthetic construct
  source 1..50: mol_type = other DNA
aactttttgctacaagagttattgtataataaaacctttaaaaaaaatga

SEQ ID NO: 68565 - DNA, 50 bp, synthetic construct
  source 1..50: mol_type = other DNA
tgagccactcatttttttaaaggtaccccgcaaaaaaattgaatatgggc

SEQ ID NO: 68566 - DNA, 50 bp, synthetic construct
  source 1..50: mol_type = other DNA
atcttacattaaaaataatttttaattaaaactacttgttattgtataat

SEQ ID NO: 68567 - DNA, 50 bp, synthetic construct
  source 1..50: mol_type = other DNA
agggtggcagcctactgccgtgtgtcagcaatgcagtagcgtgtgacctt

SEQ ID NO: 68568 - DNA, 50 bp, synthetic construct
  source 1..50: mol_type = other DNA
gcaggaacagaccgggcctaccatacccggtgggctgtatcagttcttct

SEQ ID NO: 68569 - DNA, 50 bp, synthetic construct
  source 1..50: mol_type = other DNA
ttccatgtacttttctccttattgcccttgaaggagtagatacccagaga

SEQ ID NO: 68570 - DNA, 50 bp, synthetic construct
  source 1..50: mol_type = other DNA
agctgtggcaaaaatgtgtcacagcttaattgcaaatttaagcctatttt

SEQ ID NO: 68571 - DNA, 50 bp, synthetic construct
  source 1..50: mol_type = other DNA
cagaagtacagatttcaacgaaagatctgatccggacggcacttcgaatg

SEQ ID NO: 68572 - DNA, 50 bp, synthetic construct
  source 1..50: mol_type = other DNA
tgcaaaaggcggtaacaaagacggcattttctgctgaaaagcctttcttt

SEQ ID NO: 68573 - DNA, 50 bp, synthetic construct
  source 1..50: mol_type = other DNA
cagctgtgggttctgctgattccagctggaacccggagaaccgccagcgg

SEQ ID NO: 68574 - DNA, 50 bp, synthetic construct
  source 1..50: mol_type = other DNA
agtattttcctcctataccgacaggcttgtcgccaaagtcggaaagccca

SEQ ID NO: 68575 - DNA, 50 bp, synthetic construct
  source 1..50: mol_type = other DNA
taagcagctgcgataatcataaaaaattaaaaacagctcaaggctgctat

SEQ ID NO: 68576 - DNA, 50 bp, synthetic construct
  source 1..50: mol_type = other DNA
tctaaaaaacttttatatcaagcgatatgcccatagattaaaaggttaat

SEQ ID NO: 68577 - DNA, 50 bp, synthetic construct
  source 1..50: mol_type = other DNA
taattcttttagatgatttattttatgtaataaatcatctatatatattt

SEQ ID NO: 68578 - DNA, 50 bp, synthetic construct
  source 1..50: mol_type = other DNA
tcttccgcaagcggtgccgtctcatccgtcgtagcacagactgccatgct

SEQ ID NO: 68579 - DNA, 50 bp, synthetic construct
  source 1..50: mol_type = other DNA
ggggcatcttccgcttgttttcccatgcgcaaaccgaaatttgaaacccc

SEQ ID NO: 68580 - DNA, 50 bp, synthetic construct
  source 1..50: mol_type = other DNA
cgattttatttacaatccgcatgaaagtgtgcctttgcggtgtaaaatca

SEQ ID NO: 68581 - DNA, 50 bp, synthetic construct
  source 1..50: mol_type = other DNA
aaacacaattcatctcacagatgagcagctttgctgcctcaatgtactca

SEQ ID NO: 68582 - DNA, 50 bp, synthetic construct
  source 1..50: mol_type = other DNA
tccatgggcatcttattatccgctttccccacgaataagattatcaaaaa

SEQ ID NO: 68583 - DNA, 50 bp, synthetic construct
  source 1..50: mol_type = other DNA
tctttttttgatattgttggcattttcatgcgaaaagtaagcaaaatcga

SEQ ID NO: 68584 - DNA, 50 bp, synthetic construct
  source 1..50: mol_type = other DNA
ggtccccaaaatcggatagcggtggccaccgtgtgtcgatttttgtaaca

SEQ ID NO: 68585 - DNA, 50 bp, synthetic construct
  source 1..50: mol_type = other DNA
ctgttcaaaaggatcatcagaaaactttttcttctacggcttttattttc

SEQ ID NO: 68586 - DNA, 50 bp, synthetic construct
  source 1..50: mol_type = other DNA
ttttgttaagtatatagggtttttgaaaaaactcccgcaccgtggcagcc

SEQ ID NO: 68587 - DNA, 50 bp, synthetic construct
  source 1..50: mol_type = other DNA
ttccttgtctgcgccccatgctcacctgaacctggggatgcggacggtga

SEQ ID NO: 68588 - DNA, 50 bp, synthetic construct
  source 1..50: mol_type = other DNA
ataattctcttgtcgagagggaattgacaatctggtccggctggaagcaa

SEQ ID NO: 68589 - DNA, 50 bp, synthetic construct
  source 1..50: mol_type = other DNA
atatttaaataatttgtagatttttaaaaacaaaaacaatttttaaggat

SEQ ID NO: 68590 - DNA, 50 bp, synthetic construct
  source 1..50: mol_type = other DNA
ggtgtgctatgatttttaaaatgtgcgcattttatggttagttttactat

SEQ ID NO: 68591 - DNA, 50 bp, synthetic construct
  source 1..50: mol_type = other DNA
tcctgccaatgatttatttctcataaatgggaaagcgaaaattggcatct

SEQ ID NO: 68592 - DNA, 50 bp, synthetic construct
  source 1..50: mol_type = other DNA
tattgagattttctttttataatcataatttcaaaacgaagaataatata

SEQ ID NO: 68593 - DNA, 50 bp, synthetic construct
  source 1..50: mol_type = other DNA
ctatgaccgataactcaacatcaatatggaaagtgcccattcaatcaaag

SEQ ID NO: 68594 - DNA, 50 bp, synthetic construct
  source 1..50: mol_type = other DNA
ttatggaagctgttaatagacagggaccgctttcccgttttcaattatgt

SEQ ID NO: 68595 - DNA, 50 bp, synthetic construct
  source 1..50: mol_type = other DNA
gttataaccacatttgcaagacgtggactactgacagatgatgagttaaa

SEQ ID NO: 68596 - DNA, 50 bp, synthetic construct
  source 1..50: mol_type = other DNA
cttctgcagaagacctatacggcagaaaggtgaaaggtattcaagaaaac

SEQ ID NO: 68597 - DNA, 50 bp, synthetic construct
  source 1..50: mol_type = other DNA
tcatagggatcttaaaacaggaaaagatgcctgtgatggaaccagggttc

SEQ ID NO: 68598 - DNA, 50 bp, synthetic construct
  source 1..50: mol_type = other DNA
acacaccaccgaacacggggtcggaacagacctcgcagatgttattgtac

SEQ ID NO: 68599 - DNA, 50 bp, synthetic construct
  source 1..50: mol_type = other DNA
ccccaggcaccgaaaaagggtataaatcgctatgcttccgaaccctggga

SEQ ID NO: 68600 - DNA, 50 bp, synthetic construct
  source 1..50: mol_type = other DNA
attcagttatttttcaggtatgggatcatatatataggaagtaatccagt

SEQ ID NO: 68601 - DNA, 50 bp, synthetic construct
  source 1..50: mol_type = other DNA
atttatgcatcagttgattataaatatttattataatgctatttgtaaat

SEQ ID NO: 68602 - DNA, 50 bp, synthetic construct
  source 1..50: mol_type = other DNA
cattcatatgtcattataataacgtacagctggttgaattcacatgaagc

SEQ ID NO: 68603 - DNA, 50 bp, synthetic construct
  source 1..50: mol_type = other DNA
ttcaaaatagtaaagtatcattaaatgataggatagatttctattttaaa

SEQ ID NO: 68604 - DNA, 50 bp, synthetic construct
  source 1..50: mol_type = other DNA
agctcctgggtttcattttatcccattatataggatgtgtgatccatgga

SEQ ID NO: 68605 - DNA, 50 bp, synthetic construct
  source 1..50: mol_type = other DNA
caaatttatctataaaaattgacaccacatattgtttaaaatcaaaggac

SEQ ID NO: 68606 - DNA, 50 bp, synthetic construct
  source 1..50: mol_type = other DNA
ctgtttttttctaaaaaagggtataaatgaaaagatttgaaatcggacag

SEQ ID NO: 68607 - DNA, 50 bp, synthetic construct
  source 1..50: mol_type = other DNA
agaggaaacggcatgaccgaagccatgccggcgcggatgatgttcgcgtt

SEQ ID NO: 68608 - DNA, 50 bp, synthetic construct
  source 1..50: mol_type = other DNA
gacgttatcagcactgttaggcagtagcctcttgcagttaaaataaatat

SEQ ID NO: 68609 - DNA, 50 bp, synthetic construct
  source 1..50: mol_type = other DNA
taaatctaaatcaaaagctccgtccggttgtagtaaaatatcgcgaaatg

SEQ ID NO: 68610 - DNA, 50 bp, synthetic construct
  source 1..50: mol_type = other DNA
aatgtgaatgttttgccttttacagacgaaaggagaggacgatatggatt

SEQ ID NO: 68611 - DNA, 50 bp, synthetic construct
  source 1..50: mol_type = other DNA
acctctgcccatctttggatgcaagcttggagattcagataagggaagga

SEQ ID NO: 68612 - DNA, 50 bp, synthetic construct
  source 1..50: mol_type = other DNA
gcatatagtgacacatatacgacacttggtgtaaaattttccacttatgc

SEQ ID NO: 68613 - DNA, 50 bp, synthetic construct
  source 1..50: mol_type = other DNA
cagtgatagaaccaaaagaagcagagcaccttcctttccgaatgggtctt

SEQ ID NO: 68614 - DNA, 50 bp, synthetic construct
  source 1..50: mol_type = other DNA
attcgttgtcttggttaagggcttccagcgccttgaccggttccacggcc

SEQ ID NO: 68615 - DNA, 50 bp, synthetic construct
  source 1..50: mol_type = other DNA
ttttgttggaacagtgtaactataaatatagagaatactatgccacccta

SEQ ID NO: 68616 - DNA, 50 bp, synthetic construct
  source 1..50: mol_type = other DNA
acaatttcataggggtgataaatatgcctctattttatctatgagcgcct

SEQ ID NO: 68617 - DNA, 50 bp, synthetic construct
  source 1..50: mol_type = other DNA
tccgcataacgaatactgtttaaaattttcgttaaactctttaatccact

SEQ ID NO: 68618 - DNA, 50 bp, synthetic construct
  source 1..50: mol_type = other DNA
ttctcataaaaaatacgggacgctccgcaagggtttattttttatactct

SEQ ID NO: 68619 - DNA, 50 bp, synthetic construct
  source 1..50: mol_type = other DNA
cttaaaaccgcttttcttgagttcacgaaaaaaagacacccgaccgtagc

SEQ ID NO: 68620 - DNA, 50 bp, synthetic construct
  source 1..50: mol_type = other DNA
ctttacgccctggaagtcaacgatatggcagccaccacctcatcgtaccg

SEQ ID NO: 68621 - DNA, 50 bp, synthetic construct
  source 1..50: mol_type = other DNA
caacttctgatttgtgatgatttttcgttatttgtcatcatattcgattc

SEQ ID NO: 68622 - DNA, 50 bp, synthetic construct
  source 1..50: mol_type = other DNA
tagaagagaaaattttatattcattatataaaataaaagttagatttata

SEQ ID NO: 68623 - DNA, 50 bp, synthetic construct
  source 1..50: mol_type = other DNA
gtgctctaccaactgagctagtgaattctggatgcaacctgctagagcat

SEQ ID NO: 68624 - DNA, 50 bp, synthetic construct
  source 1..50: mol_type = other DNA
gtgtttctttggtatcggtctggctccctaccgggtcaccaaacaatctt

SEQ ID NO: 68625 - DNA, 50 bp, synthetic construct
  source 1..50: mol_type = other DNA
aacctgctgccgcaaaactccgacagtaacacggcaggcggcagggattt

SEQ ID NO: 68626 - DNA, 50 bp, synthetic construct
  source 1..50: mol_type = other DNA
gcatgactccatagacgcacgaaggctggcgttgctctatgatttgggca

SEQ ID NO: 68627 - DNA, 50 bp, synthetic construct
  source 1..50: mol_type = other DNA
taaaaaataaaaatgctctaagccatggcttttgttactttacctcttat

SEQ ID NO: 68628 - DNA, 50 bp, synthetic construct
  source 1..50: mol_type = other DNA
cgatgaaccgactgtcaagcagattaattctgattacagggaaattatct

SEQ ID NO: 68629 - DNA, 50 bp, synthetic construct
  source 1..50: mol_type = other DNA
atttcgttctgttacattgtagcatatttaaattggagactaagtgaaat

SEQ ID NO: 68630 - DNA, 50 bp, synthetic construct
  source 1..50: mol_type = other DNA
gttcagctgacgatttccagcatctgtggaacggaaagcgaatcctgttt

SEQ ID NO: 68631 - DNA, 50 bp, synthetic construct
  source 1..50: mol_type = other DNA
atgtgggtgacacttttcttttgcggaggaaaagaagatgacacagcagc

SEQ ID NO: 68632 - DNA, 50 bp, synthetic construct
  source 1..50: mol_type = other DNA
attagtattaactgctgtgttcataaatgatgatgtccgaatttatcgac

SEQ ID NO: 68633 - DNA, 50 bp, synthetic construct
  source 1..50: mol_type = other DNA
ccacgctcaaaacgcttgacctgtttactttataatagatgcgagcgtct

SEQ ID NO: 68634 - DNA, 50 bp, synthetic construct
  source 1..50: mol_type = other DNA
catttgattctcctcctcgatctaaaaggcgtggaaaggagaaataaatg

SEQ ID NO: 68635 - DNA, 50 bp, synthetic construct
  source 1..50: mol_type = other DNA
acaaggagggtacaaaaatgagcacctgcgcatatttcagcgctgttttt

SEQ ID NO: 68636 - DNA, 50 bp, synthetic construct
  source 1..50: mol_type = other DNA
gtcaaaagactcgttcaggctgtccggggagccttgttttatgcttcgat

SEQ ID NO: 68637 - DNA, 50 bp, synthetic construct
  source 1..50: mol_type = other DNA
atagttcctctctggataccagttttaatcgtggcgcagccgttttcaat

SEQ ID NO: 68638 - DNA, 50 bp, synthetic construct
  source 1..50: mol_type = other DNA
gcaaaaggatttagtcatttacaatatcacagaaaaatatatcctaggct

SEQ ID NO: 68639 - DNA, 50 bp, synthetic construct
  source 1..50: mol_type = other DNA
cctcctttatgtaaaatgtgccgcatataacacatttcaataaaaaaagc

SEQ ID NO: 68640 - DNA, 50 bp, synthetic construct
  source 1..50: mol_type = other DNA
ggtcataaaatcacacacccttttgcagaacggagaatgtagagctgacc

SEQ ID NO: 68641 - DNA, 50 bp, synthetic construct
  source 1..50: mol_type = other DNA
attgacggcgacctgattaacctttaagttatcgaaaaaaaacttacaat

SEQ ID NO: 68642 - DNA, 50 bp, synthetic construct
  source 1..50: mol_type = other DNA
ctcctctttttttgtattgttcaatcgaatacaatacaaatcgaaaccca

SEQ ID NO: 68643 - DNA, 50 bp, synthetic construct
  source 1..50: mol_type = other DNA
taatactatcaattttgatacaatataggcaatccaaaaccatagcattg

SEQ ID NO: 68644 - DNA, 50 bp, synthetic construct
  source 1..50: mol_type = other DNA
gcgtgtccctcctttatgaatgaacgcgccgccgtaaaaaagcatcacgg

SEQ ID NO: 68645 - DNA, 50 bp, synthetic construct
  source 1..50: mol_type = other DNA
caggcccttaagggcacccactacccgttatgggggccgcagtgaaaatg

SEQ ID NO: 68646 - DNA, 50 bp, synthetic construct
  source 1..50: mol_type = other DNA
attacgcattccccatgctcgtcagctgcagatcaatcagctcgtctgca

SEQ ID NO: 68647 - DNA, 50 bp, synthetic construct
  source 1..50: mol_type = other DNA
gggcaagacgctcttataagcaaatatgaatttaactttgagttttgata

SEQ ID NO: 68648 - DNA, 50 bp, synthetic construct
  source 1..50: mol_type = other DNA
attgtaaaagcgtaaaataaagggcgccctttataatagacttgtactaa

SEQ ID NO: 68649 - DNA, 50 bp, synthetic construct
  source 1..50: mol_type = other DNA
atactttacagcagcaaaagattcgagaagcattgggcgtccaaaagaaa

SEQ ID NO: 68650 - DNA, 50 bp, synthetic construct
  source 1..50: mol_type = other DNA
acgtcgatatttatgcggatgagggaaggcaggggcataacacctgagga

SEQ ID NO: 68651 - DNA, 50 bp, synthetic construct
  source 1..50: mol_type = other DNA
aataatataagtgtttatattaatatatcatatactacacttgcttttaa

SEQ ID NO: 68652 - DNA, 50 bp, synthetic construct
  source 1..50: mol_type = other DNA
tcattattaattattcatttcaggatacaaggaggaacgcaaaatgatga

SEQ ID NO: 68653 - DNA, 50 bp, synthetic construct
  source 1..50: mol_type = other DNA
ttcgtgttatttttttagaagaggatcctcttcgtctccaccaatctttg

SEQ ID NO: 68654 - DNA, 50 bp, synthetic construct
  source 1..50: mol_type = other DNA
gttctcctccttaccatatggtgttatcattaattggtacatctggcaaa

SEQ ID NO: 68655 - DNA, 50 bp, synthetic construct
  source 1..50: mol_type = other DNA
caattccatcataagtgtgctatttctattgctcacttatgatggaactt

SEQ ID NO: 68656 - DNA, 50 bp, synthetic construct
  source 1..50: mol_type = other DNA
ctcatttttatatttacaaatagtacactaactcttaatataactctact

SEQ ID NO: 68657 - DNA, 50 bp, synthetic construct
  source 1..50: mol_type = other DNA
caaagcaaatctaaactaaagtatataatttttccctaaaaaatgaggag

SEQ ID NO: 68658 - DNA, 50 bp, synthetic construct
  source 1..50: mol_type = other DNA
ggtagtatattaaaaatagttatattgataactatttaatatacttctct

SEQ ID NO: 68659 - DNA, 50 bp, synthetic construct
  source 1..50: mol_type = other DNA
gtacatttcaggacgattcacccagtgaggtggatggggatggaactaag

SEQ ID NO: 68660 - DNA, 50 bp, synthetic construct
  source 1..50: mol_type = other DNA
acatggcgaaaagaaaagtaaccacgtgattgatacccgattcctcatgt

SEQ ID NO: 68661 - DNA, 50 bp, synthetic construct
  source 1..50: mol_type = other DNA
gcacagaaatccaggcataagggtataaccttatggtggacttaattcta

SEQ ID NO: 68662 - DNA, 50 bp, synthetic construct
  source 1..50: mol_type = other DNA
acgatttccgattcactttttgaatattattaaaatgaagaattattctt

SEQ ID NO: 68663 - DNA, 50 bp, synthetic construct
  source 1..50: mol_type = other DNA
gcgtctaaggacattatccttcaatattgaaaatagttggaacaagtact

SEQ ID NO: 68664 - DNA, 50 bp, synthetic construct
  source 1..50: mol_type = other DNA
atgtacaaaacacccggaaaatttattggctttcagagtgatatatagac

SEQ ID NO: 68665 - DNA, 50 bp, synthetic construct
  source 1..50: mol_type = other DNA
gaaatatggcttccggaaaatcgggacaagggttccggatatcatcataa

SEQ ID NO: 68666 - DNA, 50 bp, synthetic construct
  source 1..50: mol_type = other DNA
agtccccatacagataaaattgtatatccaacttattgctaatctcactg

SEQ ID NO: 68667 - DNA, 50 bp, synthetic construct
  source 1..50: mol_type = other DNA
accgattgcaatggtatttgtccagcgattcgtcgaacggtgcaatcaga

SEQ ID NO: 68668 - DNA, 50 bp, synthetic construct
  source 1..50: mol_type = other DNA
cgaagctataccgtttctctctcgcccgaaagtgaatgggtcatctttga

SEQ ID NO: 68669 - DNA, 50 bp, synthetic construct
  source 1..50: mol_type = other DNA
gatcagatctcggatcgttactgacaccaaaaaccggccgagatctttgt

SEQ ID NO: 68670 - DNA, 50 bp, synthetic construct
  source 1..50: mol_type = other DNA
ttgcagatattactgcaattagcgaccgcgaacgtagaaactatctgcag

SEQ ID NO: 68671 - DNA, 50 bp, synthetic construct
  source 1..50: mol_type = other DNA
gtagaaaaagcattaaaagaagaaggaatatgtcatacgataaagcgagg

SEQ ID NO: 68672 - DNA, 50 bp, synthetic construct
  source 1..50: mol_type = other DNA
tttttcgttcatagaaaatttacagagaattattttctatttcatctaaa

SEQ ID NO: 68673 - DNA, 50 bp, synthetic construct
  source 1..50: mol_type = other DNA
cgagaatgctagaaaagttcaaaaccatttataggggagcttttttcact

SEQ ID NO: 68674 - DNA, 50 bp, synthetic construct
  source 1..50: mol_type = other DNA
attatgggtataatataaaaaatttaatttttttaaatcatgaccatcac

SEQ ID NO: 68675 - DNA, 50 bp, synthetic construct
  source 1..50: mol_type = other DNA
aaaaacaaaccttgttgaggttaaatgcgcacttttgcacgttttaaatt

SEQ ID NO: 68676 - DNA, 50 bp, synthetic construct
  source 1..50: mol_type = other DNA
attttccttctttatacatattgtatagcataaaaaataggagggaaaat

SEQ ID NO: 68677 - DNA, 50 bp, synthetic construct
  source 1..50: mol_type = other DNA
tatgttcgtaattaatgcttaataattattgccgtttaaaaaggaccgga

SEQ ID NO: 68678 - DNA, 50 bp, synthetic construct
  source 1..50: mol_type = other DNA
tagatacaatacgacataatatcatctgcccggggacgcgtttttacagg

SEQ ID NO: 68679 - DNA, 50 bp, synthetic construct
  source 1..50: mol_type = other DNA
cgtattttagggcgtgaactttttattacaaggcagattgttaaaatcat

SEQ ID NO: 68680 - DNA, 50 bp, synthetic construct
  source 1..50: mol_type = other DNA
ggtgatgcgagaatgcagcctttgtattttccttgcagcacttcatcggc

SEQ ID NO: 68681 - DNA, 50 bp, synthetic construct
  source 1..50: mol_type = other DNA
ttaaaaaaatgagatatgcatttgcagaaatttatggtggcttattttga

SEQ ID NO: 68682 - DNA, 50 bp, synthetic construct
  source 1..50: mol_type = other DNA
agacgatgataaaagttgaaatttgtttgaaacaattttgcaaataaagg

SEQ ID NO: 68683 - DNA, 50 bp, synthetic construct
  source 1..50: mol_type = other DNA
atatcagaggcgaaaggcataacacgttccggcatatctttgtgcagtat

SEQ ID NO: 68684 - DNA, 50 bp, synthetic construct
  source 1..50: mol_type = other DNA
ggtgggtgtgcattgtatcatttgtgcaattgcagtggagcatggctacg

SEQ ID NO: 68685 - DNA, 50 bp, synthetic construct
  source 1..50: mol_type = other DNA
acatagtcgatgccagggtcttaaagctgagacccaggcagcgatcagag

SEQ ID NO: 68686 - DNA, 50 bp, synthetic construct
  source 1..50: mol_type = other DNA
catccgagcgcaccacttgaaatcatggtcgcagccgcaccgctcgcaat

SEQ ID NO: 68687 - DNA, 50 bp, synthetic construct
  source 1..50: mol_type = other DNA
gtggggttctgggcggagccggagacctccgcatccgtacagatcatgga

SEQ ID NO: 68688 - DNA, 50 bp, synthetic construct
  source 1..50: mol_type = other DNA
cctttttgtgttcccatcatagtgttgactgattcatatttaaaaaactc

SEQ ID NO: 68689 - DNA, 50 bp, synthetic construct
  source 1..50: mol_type = other DNA
aaatatgtccaaaagcatataaggagaaccaattacttgtctttatatat

SEQ ID NO: 68690 - DNA, 50 bp, synthetic construct
  source 1..50: mol_type = other DNA
tatcctcatttttcgcgaaaggagtattttttgtaagttgataaacaata

SEQ ID NO: 68691 - DNA, 50 bp, synthetic construct
  source 1..50: mol_type = other DNA
tgatccgttacagaatgaccatctcgcaatgtccgttctgataccatttc

SEQ ID NO: 68692 - DNA, 50 bp, synthetic construct
  source 1..50: mol_type = other DNA
aggtaattgcccttttgcattttcaataaatttgtaaattcaatctatta

SEQ ID NO: 68693 - DNA, 50 bp, synthetic construct
  source 1..50: mol_type = other DNA
cgcgtctttgtccgtggaaccggcctgccgcagccgtcgtgcagaacgcg

SEQ ID NO: 68694 - DNA, 50 bp, synthetic construct
  source 1..50: mol_type = other DNA
tgatgggctttttgggcatgggcaataacaagccttcaaatgcgccattc

SEQ ID NO: 68695 - DNA, 50 bp, synthetic construct
  source 1..50: mol_type = other DNA
tgtacaacgaacatcagcaacctcatcaaatttctgaattttttcttcta

SEQ ID NO: 68696 - DNA, 50 bp, synthetic construct
  source 1..50: mol_type = other DNA
tccaatatacagcgtgataaaaagttcttttccttacgctctgtaatggt

SEQ ID NO: 68697 - DNA, 50 bp, synthetic construct
  source 1..50: mol_type = other DNA
ctccttatgctgatttaattcataaagacaaaaataaatataataaggag

SEQ ID NO: 68698 - DNA, 50 bp, synthetic construct
  source 1..50: mol_type = other DNA
cgacagtcaatccgatcacaaaacagctttttcgtttatgctacctttcg

SEQ ID NO: 68699 - DNA, 50 bp, synthetic construct
  source 1..50: mol_type = other DNA
ccgcatagctctggaaggcatacacggcaatgcgggcggaggctgcgcgc

SEQ ID NO: 68700 - DNA, 50 bp, synthetic construct
  source 1..50: mol_type = other DNA
ttattttagttatcatcttttttttagaaaaaaattaatatctaacataa

SEQ ID NO: 68701 - DNA, 50 bp, synthetic construct
  source 1..50: mol_type = other DNA
tgaataacacgatacttttcaaattcccttgaaaaaagtcacgaaaatcg

SEQ ID NO: 68702 - DNA, 50 bp, synthetic construct
  source 1..50: mol_type = other DNA
ctcttttcccctgttggttacaggcagaatacctctacagcctcattgaa

SEQ ID NO: 68703 - DNA, 50 bp, synthetic construct
  source 1..50: mol_type = other DNA
ttataatgggcataaagtatttatttgtaaagttgtactcgatactataa

SEQ ID NO: 68704 - DNA, 50 bp, synthetic construct
  source 1..50: mol_type = other DNA
ttataaaatcttccgtgacattgaaatcgcattcatttctgattctatac

SEQ ID NO: 68705 - DNA, 50 bp, synthetic construct
  source 1..50: mol_type = other DNA
caccagcctattgatttttgtgccggattgaccaaatgaataatgtggtg

SEQ ID NO: 68706 - DNA, 50 bp, synthetic construct
  source 1..50: mol_type = other DNA
tccgctgacgcacctttccagggtggaggatgtaaaggggcgtgggatgt

SEQ ID NO: 68707 - DNA, 50 bp, synthetic construct
  source 1..50: mol_type = other DNA
cgggcatgtactcgcaagacaagagcagcagctctgcgaggcgatggccg

SEQ ID NO: 68708 - DNA, 50 bp, synthetic construct
  source 1..50: mol_type = other DNA
tatcggtaatgcatcatccgattgcaatgtcgtcaaaggcgtactcgatt

SEQ ID NO: 68709 - DNA, 50 bp, synthetic construct
  source 1..50: mol_type = other DNA
tgagttttaatactatttcctgattaagttaaaagcattctgcaaaaatt

SEQ ID NO: 68710 - DNA, 50 bp, synthetic construct
  source 1..50: mol_type = other DNA
tgctcttaatatatctactttagaaaactaaagtgttatgtctattatgt

SEQ ID NO: 68711 - DNA, 50 bp, synthetic construct
  source 1..50: mol_type = other DNA
aaaaataaacccttgcggatttatcggttgcaatcaatggacctattttg

SEQ ID NO: 68712 - DNA, 50 bp, synthetic construct
  source 1..50: mol_type = other DNA
ttgcaccagtgcaacatttttaagtactttacaaacttttaaatgtgtga

SEQ ID NO: 68713 - DNA, 50 bp, synthetic construct
  source 1..50: mol_type = other DNA
ctgtatcaattcttcttgtttgtttgtcgaacgaatggagtttgaagcag

SEQ ID NO: 68714 - DNA, 50 bp, synthetic construct
  source 1..50: mol_type = other DNA
ctttggcaagctgggacggcgtaccggtcttttcatttttcttgggactc

SEQ ID NO: 68715 - DNA, 50 bp, synthetic construct
  source 1..50: mol_type = other DNA
taggcatacacgccgcattttgatatatcatttggcagatgcgtcaaggg

SEQ ID NO: 68716 - DNA, 50 bp, synthetic construct
  source 1..50: mol_type = other DNA
aatccttgtacccggctgtgacacggctttcattatgcaaaacaatgaca

SEQ ID NO: 68717 - DNA, 50 bp, synthetic construct
  source 1..50: mol_type = other DNA
actatttgcatttggcaaattaagatctttctttgctcttcgcagatggt

SEQ ID NO: 68718 - DNA, 50 bp, synthetic construct
  source 1..50: mol_type = other DNA
atcctgcttattctttttggatttgtaatgccaataactgaaaggtggac

SEQ ID NO: 68719 - DNA, 50 bp, synthetic construct
  source 1..50: mol_type = other DNA
attggctggatgctggattatcttcgaagattttctggcttaattgatta

SEQ ID NO: 68720 - DNA, 50 bp, synthetic construct
  source 1..50: mol_type = other DNA
ctccttccgcacactgtacagcaggagtgatatatagtgtcggaaaggag

SEQ ID NO: 68721 - DNA, 50 bp, synthetic construct
  source 1..50: mol_type = other DNA
caactttcacaatctccggcacttcttttcagaacagatcgagggcatca

SEQ ID NO: 68722 - DNA, 50 bp, synthetic construct
  source 1..50: mol_type = other DNA
cagcttcaggaagaatcagctttccatagagaggattctcgctgatataa

SEQ ID NO: 68723 - DNA, 50 bp, synthetic construct
  source 1..50: mol_type = other DNA
tgaattatacccttatttttacctttagtcaaaaatataaaattctttag

SEQ ID NO: 68724 - DNA, 50 bp, synthetic construct
  source 1..50: mol_type = other DNA
tggccaaatccgtaaccacgataccggcgacggggtttttgagcttatga

SEQ ID NO: 68725 - DNA, 50 bp, synthetic construct
  source 1..50: mol_type = other DNA
tctgaaccaaatcggctcggaggcgtatacgtcagaggatgcggggcgga

SEQ ID NO: 68726 - DNA, 50 bp, synthetic construct
  source 1..50: mol_type = other DNA
tgacaaaatttatcccaagggaaatatatcgcaagccgtaaattttgatc

SEQ ID NO: 68727 - DNA, 50 bp, synthetic construct
  source 1..50: mol_type = other DNA
gacccatatggacagccttgaagaattgtttcttagatccgaaacgggtc

SEQ ID NO: 68728 - DNA, 50 bp, synthetic construct
  source 1..50: mol_type = other DNA
ttactccatcttgtacgcttcggcgaagcaaagcgtacaagatggagagt

SEQ ID NO: 68729 - DNA, 50 bp, synthetic construct
  source 1..50: mol_type = other DNA
cgcttttcttctgttttaggcataaaaatatctatgcactgcgtgaagga

SEQ ID NO: 68730 - DNA, 50 bp, synthetic construct
  source 1..50: mol_type = other DNA
attccggcgattaagccgaaatatgccaaaaccggcaccatcaccggcca

SEQ ID NO: 68731 - DNA, 50 bp, synthetic construct
  source 1..50: mol_type = other DNA
agttttcgacatttgtaatgggaaaaggagtattacacatggcaaaaaga

SEQ ID NO: 68732 - DNA, 50 bp, synthetic construct
  source 1..50: mol_type = other DNA
aagcctataccctaatgaagtatgggcaatcttgtgcatggtgtccagtg

SEQ ID NO: 68733 - DNA, 50 bp, synthetic construct
  source 1..50: mol_type = other DNA
ttttttcttaaaattgctctatgtattattagcacaacttttagtagaaa

SEQ ID NO: 68734 - DNA, 50 bp, synthetic construct
  source 1..50: mol_type = other DNA
tttgaaaggaaatctatcaaaatttatggtgtttcagaaaaggaatcaat

SEQ ID NO: 68735 - DNA, 50 bp, synthetic construct
  source 1..50: mol_type = other DNA
atattaactctaaaccgagatataatcatcattctggaaagagtatggtg

SEQ ID NO: 68736 - DNA, 50 bp, synthetic construct
  source 1..50: mol_type = other DNA
tcagaaaccaaattgtccgttaaggccgaaaaaatcaatcggctttcttt

SEQ ID NO: 68737 - DNA, 50 bp, synthetic construct
  source 1..50: mol_type = other DNA
ggaattaacattacatttcccattattatggtacataaaaaaagaagttt

SEQ ID NO: 68738 - DNA, 50 bp, synthetic construct
  source 1..50: mol_type = other DNA
attgatgattgacacgccccttctagccaaagggcgtgtggcccatctaa

SEQ ID NO: 68739 - DNA, 50 bp, synthetic construct
  source 1..50: mol_type = other DNA
gcaccgttttattttcttccagctttttgaagaagataatcgtgaggtga

SEQ ID NO: 68740 - DNA, 50 bp, synthetic construct
  source 1..50: mol_type = other DNA
ggcggcagtaccgcagtaccagcccgcattgcgactgctgtactgccaca

SEQ ID NO: 68741 - DNA, 50 bp, synthetic construct
  source 1..50: mol_type = other DNA
aaaatcctttctgaaaaaagcggaatcagcccattttcaaaaaggagctg

SEQ ID NO: 68742 - DNA, 50 bp, synthetic construct
  source 1..50: mol_type = other DNA
atggggaacacgccatttggatatataacttaaaatgagcaaaatctcaa

SEQ ID NO: 68743 - DNA, 50 bp, synthetic construct
  source 1..50: mol_type = other DNA
ggtttaacgttcttccacaaatctttaggcttggcagcataactgaaaat

SEQ ID NO: 68744 - DNA, 50 bp, synthetic construct
  source 1..50: mol_type = other DNA
ttgtggctccacttaattttcacagatgaaaaaattaaaaatttacttga

SEQ ID NO: 68745 - DNA, 50 bp, synthetic construct
  source 1..50: mol_type = other DNA
gccgaattttcggttgtttaattattacaggaaaggaagaaaaaatggta

SEQ ID NO: 68746 - DNA, 50 bp, synthetic construct
  source 1..50: mol_type = other DNA
aaaataaagtcgaaatgtatgtgttaaaatatcaataaagtgttgatttt

SEQ ID NO: 68747 - DNA, 50 bp, synthetic construct
  source 1..50: mol_type = other DNA
tccactgtctctgactcttttctgcgttgaacagaagcacgttcacaatg

SEQ ID NO: 68748 - DNA, 50 bp, synthetic construct
  source 1..50: mol_type = other DNA
aataatgtccccaataaaggccgatattttaagacatttgatggagttat

SEQ ID NO: 68749 - DNA, 50 bp, synthetic construct
  source 1..50: mol_type = other DNA
cagcatcagagcatcggaggaaacaatgtaatccccctgcgctggggctg

SEQ ID NO: 68750 - DNA, 50 bp, synthetic construct
  source 1..50: mol_type = other DNA
gccgtaccaagtgcagtcaccccggctgttcggacttcatgacagcgggg

SEQ ID NO: 68751 - DNA, 50 bp, synthetic construct
  source 1..50: mol_type = other DNA
ctcctttctctttgggtagtctatatatcccataccgcagtgtgccggga

SEQ ID NO: 68752 - DNA, 50 bp, synthetic construct
  source 1..50: mol_type = other DNA
cttcagtgcctcaataatcagcagttctgctctaccttatctcagggcaa

SEQ ID NO: 68753 - DNA, 50 bp, synthetic construct
  source 1..50: mol_type = other DNA
acgaaaccgtgacacaggttgtatcgtttgtttctgtaccacttcacaaa

SEQ ID NO: 68754 - DNA, 50 bp, synthetic construct
  source 1..50: mol_type = other DNA
gctgcgtagcttacgcagcacaatccattatgctgcgcttctgcgtgtgt

SEQ ID NO: 68755 - DNA, 50 bp, synthetic construct
  source 1..50: mol_type = other DNA
tttcggctctttcgactggattcgaacgtcatcatcgacggccgctccac

SEQ ID NO: 68756 - DNA, 50 bp, synthetic construct
  source 1..50: mol_type = other DNA
ccaaaaataatttgattttttgaaaaatgcaaaaatgatggtctataaga

SEQ ID NO: 68757 - DNA, 50 bp, synthetic construct
  source 1..50: mol_type = other DNA
gattttccggggtttctttatgaaattttatgccagaaaaagagaaaatc

SEQ ID NO: 68758 - DNA, 50 bp, synthetic construct
  source 1..50: mol_type = other DNA
ccccttaatattcctttataactgcaaagaaggccaggaaaatcaatcgg

SEQ ID NO: 68759 - DNA, 50 bp, synthetic construct
  source 1..50: mol_type = other DNA
tccgaaaatatttacaaaattccttggaaccgactgcctttattgtagca

SEQ ID NO: 68760 - DNA, 50 bp, synthetic construct
  source 1..50: mol_type = other DNA
taagcctggatgggttatttttaattaaagtaataacaaaaccaattggc

SEQ ID NO: 68761 - DNA, 50 bp, synthetic construct
  source 1..50: mol_type = other DNA
taaaaatctaatggctagtttctcgtaagatggaagcctatagaacattt

SEQ ID NO: 68762 - DNA, 50 bp, synthetic construct
  source 1..50: mol_type = other DNA
attactggcgcatatgttttcggatcagttgaaacacgtgcataagcagc

SEQ ID NO: 68763 - DNA, 50 bp, synthetic construct
  source 1..50: mol_type = other DNA
cttaatccctcaacctgacaaacgatcgtcaactgatatgaaccattaag

SEQ ID NO: 68764 - DNA, 50 bp, synthetic construct
  source 1..50: mol_type = other DNA
aggcaagaatgagaaaaacggcataggctgacaaagccttattgttcctt

SEQ ID NO: 68765 - DNA, 50 bp, synthetic construct
  source 1..50: mol_type = other DNA
cacaggctgccacggtgcgggagcttttttccgcacaggggaagcacttg

SEQ ID NO: 68766 - DNA, 50 bp, synthetic construct
  source 1..50: mol_type = other DNA
gcggttcgactgcaagcattttgccagcaatgctcttccagtcgattctc

SEQ ID NO: 68767 - DNA, 50 bp, synthetic construct
  source 1..50: mol_type = other DNA
tgagggcaaaaattggaacgaaaaattttaaaagatatattttgcttcca

SEQ ID NO: 68768 - DNA, 50 bp, synthetic construct
  source 1..50: mol_type = other DNA
tttccgaatgtcaacatacacaagaacttgaagatgctatcatttctgaa

SEQ ID NO: 68769 - DNA, 50 bp, synthetic construct
  source 1..50: mol_type = other DNA
ttgtcgtcaatagcgtatacttattaaagttaatacgattttttatgaaa

SEQ ID NO: 68770 - DNA, 50 bp, synthetic construct
  source 1..50: mol_type = other DNA
ttattatagtttatatttttggataaattcggtgtatcgtggtataatat

SEQ ID NO: 68771 - DNA, 50 bp, synthetic construct
  source 1..50: mol_type = other DNA
tttcataatttttacctctctgcggcatcagagagcgttacagtaagcgc

SEQ ID NO: 68772 - DNA, 50 bp, synthetic construct
  source 1..50: mol_type = other DNA
aaatgcgttcagtgcggcgtgtgcattcacaaaacgaggtgaactcatgc

SEQ ID NO: 68773 - DNA, 50 bp, synthetic construct
  source 1..50: mol_type = other DNA
taaaatttattcgtagagtttacagccatccaagccatgaatcagctttg

SEQ ID NO: 68774 - DNA, 50 bp, synthetic construct
  source 1..50: mol_type = other DNA
gggatgatcgtgcagagatgaaaatatttttttattttgcgatatgctca

SEQ ID NO: 68775 - DNA, 50 bp, synthetic construct
  source 1..50: mol_type = other DNA
ataccgcagccggaaaatcatccagctggtattttttatggcaaacggag

SEQ ID NO: 68776 - DNA, 50 bp, synthetic construct
  source 1..50: mol_type = other DNA
tccttataaaacgtatggaaaaagggctctttccaccgtccgcggaaacc

SEQ ID NO: 68777 - DNA, 50 bp, synthetic construct
  source 1..50: mol_type = other DNA
tacggcatcaaatcatagaatttttgatggatatataacttgataattac

SEQ ID NO: 68778 - DNA, 50 bp, synthetic construct
  source 1..50: mol_type = other DNA
tcaacaatctgcgagcagattgaaatatcaatttcagttacgattgctcc

SEQ ID NO: 68779 - DNA, 50 bp, synthetic construct
  source 1..50: mol_type = other DNA
cttttcggtttacttgtcaatagtttattttcattttcaacacctctaat

SEQ ID NO: 68780 - DNA, 50 bp, synthetic construct
  source 1..50: mol_type = other DNA
aacgcttcttgccattcttatcatccatgcacaaaatggttgggagcttg

SEQ ID NO: 68781 - DNA, 50 bp, synthetic construct
  source 1..50: mol_type = other DNA
ctcgttgaaaacactttgaggaggtggcattaccacacgttttcctttcg

SEQ ID NO: 68782 - DNA, 50 bp, synthetic construct
  source 1..50: mol_type = other DNA
gtctgtctcacagcggatcagtcttctatcttctccggcttggaggattc

SEQ ID NO: 68783 - DNA, 50 bp, synthetic construct
  source 1..50: mol_type = other DNA
ttcagataacatgggctactctccgtatggaataaagcgtgtcttcttca

SEQ ID NO: 68784 - DNA, 50 bp, synthetic construct
  source 1..50: mol_type = other DNA
aggttcaggaatgtcggacggttcttgatattaagggcatccgaacgggg

SEQ ID NO: 68785 - DNA, 50 bp, synthetic construct
  source 1..50: mol_type = other DNA
attgcaagcgttaagtcgaaaaaatatgtcactacccgaagataggaaaa

SEQ ID NO: 68786 - DNA, 50 bp, synthetic construct
  source 1..50: mol_type = other DNA
agctcgttcaagatgctacctccgctcggccaggccgatccgctcggtga

SEQ ID NO: 68787 - DNA, 50 bp, synthetic construct
  source 1..50: mol_type = other DNA
ccctgccgctgcatttctactccgcccggtaaactcggtcagcgcgtggg

SEQ ID NO: 68788 - DNA, 50 bp, synthetic construct
  source 1..50: mol_type = other DNA
gtgtatcaattattttattcatatcgataaactcactgtccgtgatagtg

SEQ ID NO: 68789 - DNA, 50 bp, synthetic construct
  source 1..50: mol_type = other DNA
gccaatgaccttgtgcgccgcaaccctgctcagcgcacaaggagcaatca

SEQ ID NO: 68790 - DNA, 50 bp, synthetic construct
  source 1..50: mol_type = other DNA
tataataaaatagttaagctgtattcatagagctttcgtattttattggc

SEQ ID NO: 68791 - DNA, 50 bp, synthetic construct
  source 1..50: mol_type = other DNA
taggaatttctgatatgccgtctttgtaaacgcagtgacataaaatcaaa

SEQ ID NO: 68792 - DNA, 50 bp, synthetic construct
  source 1..50: mol_type = other DNA
gaaacgcaaaactttgtgccacaagacgacggcatctaccgtgttgaagt

SEQ ID NO: 68793 - DNA, 50 bp, synthetic construct
  source 1..50: mol_type = other DNA
ttcatctttgatttctacatttccttttgtaacttaaaatcttatattta

SEQ ID NO: 68794 - DNA, 50 bp, synthetic construct
  source 1..50: mol_type = other DNA
tctcggtttgaaaaaagagaattccttaactgtacctattataacggagc

SEQ ID NO: 68795 - DNA, 50 bp, synthetic construct
  source 1..50: mol_type = other DNA
tcctattctgcaaccgttccatagtcctttatatttttcgttcgtgagga

SEQ ID NO: 68796 - DNA, 50 bp, synthetic construct
  source 1..50: mol_type = other DNA
acacagatattatccagcgatattgccataaaactccccgcaatcgccgc

SEQ ID NO: 68797 - DNA, 50 bp, synthetic construct
  source 1..50: mol_type = other DNA
gcgctgcatcgacttgcagacccaacggggacagcaacgccaagatcgcc

SEQ ID NO: 68798 - DNA, 50 bp, synthetic construct
  source 1..50: mol_type = other DNA
ttctgcctccttctttttttcgcagcaaagaaaaaataaaggagggctgc

SEQ ID NO: 68799 - DNA, 50 bp, synthetic construct
  source 1..50: mol_type = other DNA
cagcttgctaccggaatctcatataataaatatactccgaaagcaccgtt

SEQ ID NO: 68800 - DNA, 50 bp, synthetic construct
  source 1..50: mol_type = other DNA
tctcataatatcaccacaattcttgtcagtgaagaaaagaaattgacagt

SEQ ID NO: 68801 - DNA, 50 bp, synthetic construct
  source 1..50: mol_type = other DNA
catttttcgcttattttcccatgccgacactggaatggattggaaaagag

SEQ ID NO: 68802 - DNA, 50 bp, synthetic construct
  source 1..50: mol_type = other DNA
tcctttccgacactatatatcactctattgacaaatatattgtcaaaggc

SEQ ID NO: 68803 - DNA, 50 bp, synthetic construct
  source 1..50: mol_type = other DNA
ggcattgaacggttgaggtcaacatccctttctgctgtcggttattctgt

SEQ ID NO: 68804 - DNA, 50 bp, synthetic construct
  source 1..50: mol_type = other DNA
tacacgaagatattccaaatttctcgaagcaggtgtccagtttctttttg

SEQ ID NO: 68805 - DNA, 50 bp, synthetic construct
  source 1..50: mol_type = other DNA
ccggagaactaaaaaaacgtgctccgtataggtgttatttttgtacccat

SEQ ID NO: 68806 - DNA, 50 bp, synthetic construct
  source 1..50: mol_type = other DNA
atatagttaatattggttatattataaagtaatgcatatatttgtgcgtc

SEQ ID NO: 68807 - DNA, 50 bp, synthetic construct
  source 1..50: mol_type = other DNA
aatatgcttataaaagaaagatattaaaatcttatatttgtaaggataac

SEQ ID NO: 68808 - DNA, 50 bp, synthetic construct
  source 1..50: mol_type = other DNA
catatccatcttgagtcttctttctcgcaagacgacacgaaatagacaca

SEQ ID NO: 68809 - DNA, 50 bp, synthetic construct
  source 1..50: mol_type = other DNA
aaaccgcatcactaaccgagacgcaggcgaggcttatcataaataaaact

SEQ ID NO: 68810 - DNA, 50 bp, synthetic construct
  source 1..50: mol_type = other DNA
ccctaatcaacctcatagtgtatttaaatacaccatctaaaacgatacaa

SEQ ID NO: 68811 - DNA, 50 bp, synthetic construct
  source 1..50: mol_type = other DNA
gctgattctgcgtttggttgcgggggcgcgatacagaacgcagaaagaaa

SEQ ID NO: 68812 - DNA, 50 bp, synthetic construct
  source 1..50: mol_type = other DNA
tcatcacttatggtacggactacccttccgtaactaaataaaatgaggtt

SEQ ID NO: 68813 - DNA, 50 bp, synthetic construct
  source 1..50: mol_type = other DNA
gccgtacactcagcgctagtaataatatttacaaccgtgaaacagcaggc

SEQ ID NO: 68814 - DNA, 50 bp, synthetic construct
  source 1..50: mol_type = other DNA
tttggtatctcgtttcttcttcttccaacgagaggaaatgaggcactaaa

SEQ ID NO: 68815 - DNA, 50 bp, synthetic construct
  source 1..50: mol_type = other DNA
gtaatagggggttgacctcatttgggatactttggattccccagtattat

SEQ ID NO: 68816 - DNA, 50 bp, synthetic construct
  source 1..50: mol_type = other DNA
agaaaggcgctaaaaaaccgcatcatgatgtggttttcaattaacgtctt

SEQ ID NO: 68817 - DNA, 50 bp, synthetic construct
  source 1..50: mol_type = other DNA
attttttttcaagcgacacacaacatgcagtgtgtagtaagtttttgaat

SEQ ID NO: 68818 - DNA, 50 bp, synthetic construct
  source 1..50: mol_type = other DNA
tactagcgacaacccagttcccataagcgggaactgagaaatcagttccc

SEQ ID NO: 68819 - DNA, 50 bp, synthetic construct
  source 1..50: mol_type = other DNA
cgtactcgtatgtgtaagcacacgatcatcacgtaacatatacgaggtgc

SEQ ID NO: 68820 - DNA, 50 bp, synthetic construct
  source 1..50: mol_type = other DNA
gaccgtcctctcctctcatgaggcgagcatccggcgacgggatgacggtc

SEQ ID NO: 68821 - DNA, 50 bp, synthetic construct
  source 1..50: mol_type = other DNA
aagtagagctttttttgtttgcactagtgcaaataaaatcaatatcctat

SEQ ID NO: 68822 - DNA, 50 bp, synthetic construct
  source 1..50: mol_type = other DNA
atacatgtttagatagttactatgaccaatacgcatatctaaacattatt

SEQ ID NO: 68823 - DNA, 50 bp, synthetic construct
  source 1..50: mol_type = other DNA
tgaatataagtttggacaatgatgagcgttattgtccaaactagatgtcg

SEQ ID NO: 68824 - DNA, 50 bp, synthetic construct
  source 1..50: mol_type = other DNA
ctcatgacctaggtttgggtaaggctccgcaccatcgactctaacaacct

SEQ ID NO: 68825 - DNA, 50 bp, synthetic construct
  source 1..50: mol_type = other DNA
ttttagtaataatgggttgacacactttggattccccagtattatacacc

SEQ ID NO: 68826 - DNA, 50 bp, synthetic construct
  source 1..50: mol_type = other DNA
ggtgtataatactggggaatccaaagtgtgtcaacccattattactaaaa

SEQ ID NO: 68827 - DNA, 50 bp, synthetic construct
  source 1..50: mol_type = other DNA
ctcgtttcgatgggggtatgatactagtgtcgtcaaccccctataatgta

SEQ ID NO: 68828 - DNA, 50 bp, synthetic construct
  source 1..50: mol_type = other DNA
ttagtaatagggggttgacacacttaatattatacacccatcgaaacacg

SEQ ID NO: 68829 - DNA, 50 bp, synthetic construct
  source 1..50: mol_type = other DNA
taattgcaacagctcttctacatcacgaagtgatatggctgttgacgcag

SEQ ID NO: 68830 - DNA, 50 bp, synthetic construct
  source 1..50: mol_type = other DNA
aacagtaaaaagaagtatatcatggtgatgatgaatagtgaattactgtt

SEQ ID NO: 68831 - DNA, 50 bp, synthetic construct
  source 1..50: mol_type = other DNA
attagggggttgcggcatttaggattatacacccatcgaaacacggggag

SEQ ID NO: 68832 - DNA, 50 bp, synthetic construct
  source 1..50: mol_type = other DNA
ttcgatgggtgtataatattagggaatccgaagtgtgtcaacccattatt

SEQ ID NO: 68833 - DNA, 50 bp, synthetic construct
  source 1..50: mol_type = other DNA
cgtgtttcgatgggtgtataatattaagtgtgtcaaccccctattactaa

SEQ ID NO: 68834 - DNA, 50 bp, synthetic construct
  source 1..50: mol_type = other DNA
agctctatcatttttatactgcgaattcactgtttaaaaatcacattcct

SEQ ID NO: 68835 - DNA, 50 bp, synthetic construct
  source 1..50: mol_type = other DNA
attgtattgatgggttgacacacttaatattatacacccatcgaaacaca

SEQ ID NO: 68836 - DNA, 50 bp, synthetic construct
  source 1..50: mol_type = other DNA
gttggtgggtttatggtattagggaatccaaaatgtcgcaaccgttcaac

SEQ ID NO: 68837 - DNA, 50 bp, synthetic construct
  source 1..50: mol_type = other DNA
gcagaaggcttttcaatacatgaaatttcatgtgtagatcgctatttgaa

SEQ ID NO: 68838 - DNA, 50 bp, synthetic construct
  source 1..50: mol_type = other DNA
agttttgtgggaaagaggtaataccggtagtactgctttcccacaaaaag

SEQ ID NO: 68839 - DNA, 50 bp, synthetic construct
  source 1..50: mol_type = other DNA
caacgataataaaaagaagtgttcatgtggagtgcgtggtattgatgtca

SEQ ID NO: 68840 - DNA, 50 bp, synthetic construct
  source 1..50: mol_type = other DNA
tcagcgccgcacccgaggagatgccgaggtccaggtcatgatcgcgcccg

SEQ ID NO: 68841 - DNA, 50 bp, synthetic construct
  source 1..50: mol_type = other DNA
cgtgtatcttgcgcctgaagccaggtgttatttcggcgtaattaactacg

SEQ ID NO: 68842 - DNA, 50 bp, synthetic construct
  source 1..50: mol_type = other DNA
aatgtgcgtgtttagctatgtaaaagtattcttgccttaacactcatatc

SEQ ID NO: 68843 - DNA, 50 bp, synthetic construct
  source 1..50: mol_type = other DNA
tgcctgcgaaactttttcccatttcaaaatgggaacaaattgacgtcgcc

SEQ ID NO: 68844 - DNA, 50 bp, synthetic construct
  source 1..50: mol_type = other DNA
attgccattaataaaaaattgatggtgatcaatattggtttaagtgaaat

SEQ ID NO: 68845 - DNA, 50 bp, synthetic construct
  source 1..50: mol_type = other DNA
atcggggcttggacgggttgtgcaattggtcgtaattttgatagggtaca

SEQ ID NO: 68846 - DNA, 50 bp, synthetic construct
  source 1..50: mol_type = other DNA
aacggtagatctgataaaaagtgctcgcacttttggggagaaataccgta

SEQ ID NO: 68847 - DNA, 50 bp, synthetic construct
  source 1..50: mol_type = other DNA
aataatcactcgccacataaagaaactgttgtaagactaacacggaaaaa

SEQ ID NO: 68848 - DNA, 50 bp, synthetic construct
  source 1..50: mol_type = other DNA
cacactcgccgaaaggccggatttagaagtcggggtgactggcgttcgtt

SEQ ID NO: 68849 - DNA, 50 bp, synthetic construct
  source 1..50: mol_type = other DNA
aacggttcaaacgaacgccagtcacccgactattctctaaatccggcctt

SEQ ID NO: 68850 - DNA, 50 bp, synthetic construct
  source 1..50: mol_type = other DNA
aaaaaactactgccagcgataacttatattaggtacactcttattatctg

SEQ ID NO: 68851 - DNA, 50 bp, synthetic construct
  source 1..50: mol_type = other DNA
attattgttttagtttgcgatagataccggtcgcaaactaagagcccttt

SEQ ID NO: 68852 - DNA, 50 bp, synthetic construct
  source 1..50: mol_type = other DNA
ctttcagttcgcaacgtgtttgctagagttgtctagtatactagcgaaag

SEQ ID NO: 68853 - DNA, 50 bp, synthetic construct
  source 1..50: mol_type = other DNA
cattttttagtaataatgggttgcggattccccagtattatacacccatc

SEQ ID NO: 68854 - DNA, 50 bp, synthetic construct
  source 1..50: mol_type = other DNA
tgacagctatccgctcatctcaaaacgttgagacggtagtattgatgtca

SEQ ID NO: 68855 - DNA, 50 bp, synthetic construct
  source 1..50: mol_type = other DNA
cagtttatacaaaaagcccctctcatgacaggagcgatttgtataaaata

SEQ ID NO: 68856 - DNA, 50 bp, synthetic construct
  source 1..50: mol_type = other DNA
tttagtacctcgtttactctcgttggaagaagaggaaacgagatactaaa

SEQ ID NO: 68857 - DNA, 50 bp, synthetic construct
  source 1..50: mol_type = other DNA
gctctatgatatttgtgtgaaaaaagtatttcattgtaatatcagtatga

SEQ ID NO: 68858 - DNA, 50 bp, synthetic construct
  source 1..50: mol_type = other DNA
aggttctacaatgttatacaaggtgttccttgttaaacactatagaaaaa

SEQ ID NO: 68859 - DNA, 50 bp, synthetic construct
  source 1..50: mol_type = other DNA
aatgacctatgttaatgtgtagaattttctacacacatcgattaaaatca

SEQ ID NO: 68860 - DNA, 50 bp, synthetic construct
  source 1..50: mol_type = other DNA
agtttggacaaaagtgctaccgtctcaacttgttcattattgtccaaact

SEQ ID NO: 68861 - DNA, 50 bp, synthetic construct
  source 1..50: mol_type = other DNA
gaccttttttactcaaactttcgggtcctatcgtgcgagtaaaaaagaca

SEQ ID NO: 68862 - DNA, 50 bp, synthetic construct
  source 1..50: mol_type = other DNA
gctatctccaagattgaataagtgagtttgttttgttactaatttatggt

SEQ ID NO: 68863 - DNA, 50 bp, synthetic construct
  source 1..50: mol_type = other DNA
tatgtcaataatggaaacatatcacgggaattttttacattattgacata

SEQ ID NO: 68864 - DNA, 50 bp, synthetic construct
  source 1..50: mol_type = other DNA
tatcgctgtatagcttaatattttgcagaatttctagttatgcagtgata

SEQ ID NO: 68865 - DNA, 50 bp, synthetic construct
  source 1..50: mol_type = other DNA
ttacttccttatgaggtactacctaatggtaggtgctcataaggaagtat

SEQ ID NO: 68866 - DNA, 50 bp, synthetic construct
  source 1..50: mol_type = other DNA
tttagtatctcgtttcttcttcttccaacgagagtaaacgaggtactaaa

SEQ ID NO: 68867 - DNA, 50 bp, synthetic construct
  source 1..50: mol_type = other DNA
ttaaatggataatgctccttgggattcccaaactgtgatgccgaacctaa

SEQ ID NO: 68868 - DNA, 50 bp, synthetic construct
  source 1..50: mol_type = other DNA
tcaataaccaaaatagggtgtatttaaatgcactacctgttatttacagg

SEQ ID NO: 68869 - DNA, 50 bp, synthetic construct
  source 1..50: mol_type = other DNA
ctgcggattaacagtccgtcgctctagctgtacgtccgcttcgggccctg

SEQ ID NO: 68870 - DNA, 50 bp, synthetic construct
  source 1..50: mol_type = other DNA
catcggcagcacgaggcgttgggaattcctgcgcaagatggctgccgaaa

SEQ ID NO: 68871 - DNA, 50 bp, synthetic construct
  source 1..50: mol_type = other DNA
gctggcgatcgtcaggagtgttgggcccaggccgcattgatgacgcccgc

SEQ ID NO: 68872 - DNA, 50 bp, synthetic construct
  source 1..50: mol_type = other DNA
ttagttttctaaatcacactaggtttcgttgatgtaacttacacaacaat

SEQ ID NO: 68873 - DNA, 50 bp, synthetic construct
  source 1..50: mol_type = other DNA
tagtgtagatagtcatacaatagcagggtttgtagttgctatcaacacta

SEQ ID NO: 68874 - DNA, 50 bp, synthetic construct
  source 1..50: mol_type = other DNA
ttcagatactgcttttttgactaaatttaaacaaatataacaaacatgat

SEQ ID NO: 68875 - DNA, 50 bp, synthetic construct
  source 1..50: mol_type = other DNA
ttgtatcgctttagatggtgtatttaaatacactgcttgtaagcatggga

SEQ ID NO: 68876 - DNA, 50 bp, synthetic construct
  source 1..50: mol_type = other DNA
aggtctacggtctttaaggtccttatggtgtcgcatactttaggagaaag

SEQ ID NO: 68877 - DNA, 50 bp, synthetic construct
  source 1..50: mol_type = other DNA
ttcataccatttccaaacaaaaacgcttagtaaagatgaaatggataata

SEQ ID NO: 68878 - DNA, 50 bp, synthetic construct
  source 1..50: mol_type = other DNA
ctcgtgctgtctcgttatgattggtacctatcagtatgattttttgcaat

SEQ ID NO: 68879 - DNA, 50 bp, synthetic construct
  source 1..50: mol_type = other DNA
aaacaattttcactgcttgtcgccttatcgaacaagtttatagtggattt

SEQ ID NO: 68880 - DNA, 50 bp, synthetic construct
  source 1..50: mol_type = other DNA
taatatcatggttttttgcacataattgtgagcgaaaagctatcatgtat

SEQ ID NO: 68881 - DNA, 50 bp, synthetic construct
  source 1..50: mol_type = other DNA
ccgttttattatactcaacatcccggctgatcttcacttaactaaataga

SEQ ID NO: 68882 - DNA, 50 bp, synthetic construct
  source 1..50: mol_type = other DNA
cctgtaaataacaggtagtgcatttaaatacaccctattttggttattga

SEQ ID NO: 68883 - DNA, 50 bp, synthetic construct
  source 1..50: mol_type = other DNA
ttcgatgggtgtatgatattagggaaccctaatgtcgtcaacgtatcaat

SEQ ID NO: 68884 - DNA, 50 bp, synthetic construct
  source 1..50: mol_type = other DNA
atgtgttatatagccctaccgttcgagaatggtaggtggtatcctcacac

SEQ ID NO: 68885 - DNA, 50 bp, synthetic construct
  source 1..50: mol_type = other DNA
cagtgtattttatgaaaatgttgggaccagcttttcatcaaatgacactg

SEQ ID NO: 68886 - DNA, 50 bp, synthetic construct
  source 1..50: mol_type = other DNA
tttggtatctcgtttcttgttcttccaacgagagaaaacgaggaactaaa

SEQ ID NO: 68887 - DNA, 50 bp, synthetic construct
  source 1..50: mol_type = other DNA
agcagacgagatgcaaggattgtgcttgctttccaagggtgaggtcgact

SEQ ID NO: 68888 - DNA, 50 bp, synthetic construct
  source 1..50: mol_type = other DNA
tatctttaattaagggaaacggggaatggagtttcccatagttaaagata

SEQ ID NO: 68889 - DNA, 50 bp, synthetic construct
  source 1..50: mol_type = other DNA
aggtgtaactttgaaaagtcaaataatgttaagttgttaaagttatacct

SEQ ID NO: 68890 - DNA, 50 bp, synthetic construct
  source 1..50: mol_type = other DNA
ttgggtttttctgttttattatactcacttaactaaatagacttgcccaa

SEQ ID NO: 68891 - DNA, 50 bp, synthetic construct
  source 1..50: mol_type = other DNA
tccccagccgatgccgacacatatcgtgtgttgtctacatcgggtgaatt

SEQ ID NO: 68892 - DNA, 50 bp, synthetic construct
  source 1..50: mol_type = other DNA
ttgggcaagtttgttttgttaagtgagtataataaaacagaaaaacccaa

SEQ ID NO: 68893 - DNA, 50 bp, synthetic construct
  source 1..50: mol_type = other DNA
agacactaattaagggaaacggggaatggagtttcccatagttaaagata

SEQ ID NO: 68894 - DNA, 50 bp, synthetic construct
  source 1..50: mol_type = other DNA
atttttaatacacaaaacaaacatatatgtttaacctataatttattttt

SEQ ID NO: 68895 - DNA, 50 bp, synthetic construct
  source 1..50: mol_type = other DNA
atttttagtacacaaaacaaacatatatgtttaacctataatttattttt

SEQ ID NO: 68896 - DNA, 50 bp, synthetic construct
  source 1..50: mol_type = other DNA
atttttagtacacaaaacaaacatatatgttgaacatactatttattttt

SEQ ID NO: 68897 - DNA, 50 bp, synthetic construct
  source 1..50: mol_type = other DNA
atttttagtacacaaaacaaacatatatgtttaaccaactatttattttt

SEQ ID NO: 68898 - DNA, 50 bp, synthetic construct
  source 1..50: mol_type = other DNA
atgtccgataaagaatatgtattctaaaatacatagatgttttatgtcat

SEQ ID NO: 68899 - DNA, 50 bp, synthetic construct
  source 1..50: mol_type = other DNA
ctttgttcttgtttagctaagtaagaattctggccttaccacgcacctcg

SEQ ID NO: 68900 - DNA, 50 bp, synthetic construct
  source 1..50: mol_type = other DNA
cttgtttcgatgggtgtataatattaagtgtgtcaacccattattactaa

SEQ ID NO: 68901 - DNA, 50 bp, synthetic construct
  source 1..50: mol_type = other DNA
ggagaccctctggaaacccctacggtgacttccagttctagcacgtctgc

SEQ ID NO: 68902 - DNA, 50 bp, synthetic construct
  source 1..50: mol_type = other DNA
atcaagtggaaaatctaagaattttaaaattcctagtttttgataccgcc

SEQ ID NO: 68903 - DNA, 50 bp, synthetic construct
  source 1..50: mol_type = other DNA
tatattatggaaaataaagagttttaaaattgtttaaattttccatttga

SEQ ID NO: 68904 - DNA, 50 bp, synthetic construct
  source 1..50: mol_type = other DNA
tatcaatgtgtggggcatttcacaatagccaaacaccccacactcacaga

SEQ ID NO: 68905 - DNA, 50 bp, synthetic construct
  source 1..50: mol_type = other DNA
tatgaattcatctcaaaacacgtggagacggtagtattgatgtcaagggt

SEQ ID NO: 68906 - DNA, 50 bp, synthetic construct
  source 1..50: mol_type = other DNA
tgacaatggcactaccccgcccgccagatggcgcgtggatgccggtgcca

SEQ ID NO: 68907 - DNA, 50 bp, synthetic construct
  source 1..50: mol_type = other DNA
aaaagtttcactagattaccttacatgtaatgtaatctggtgacactttg

SEQ ID NO: 68908 - DNA, 50 bp, synthetic construct
  source 1..50: mol_type = other DNA
caggtagtgcattaagatagcatataataccttcctaaatacactacctg

SEQ ID NO: 68909 - DNA, 50 bp, synthetic construct
  source 1..50: mol_type = other DNA
aagataaaagaatattttagttcttgtgtgctaaaatattctcaatgttt

SEQ ID NO: 68910 - DNA, 50 bp, synthetic construct
  source 1..50: mol_type = other DNA
cttcctcttctggtggagctgcggggaagcagtcgaactcggcggcttcc

SEQ ID NO: 68911 - DNA, 50 bp, synthetic construct
  source 1..50: mol_type = other DNA
caaataagaatgtgtaattgaccaactgtccttgagcgcacagataaata

SEQ ID NO: 68912 - DNA, 50 bp, synthetic construct
  source 1..50: mol_type = other DNA
aaaatttttgtattgaggggttgacatacacccatcaacacgagagagta

SEQ ID NO: 68913 - DNA, 50 bp, synthetic construct
  source 1..50: mol_type = other DNA
cttattgatgtaatctttttatgcaccaatacaatcgcacaaaaaataaa

SEQ ID NO: 68914 - DNA, 50 bp, synthetic construct
  source 1..50: mol_type = other DNA
atggccgttgtttaggccttgtttgagctgaaggggctgctgacggacat

SEQ ID NO: 68915 - DNA, 50 bp, synthetic construct
  source 1..50: mol_type = other DNA
aagtttcaccagattaccttacataattgaaaggtaatctggtgaaactt

SEQ ID NO: 68916 - DNA, 50 bp, synthetic construct
  source 1..50: mol_type = other DNA
cattggttattgggtaccgtgacaaatgtcacggcaactaataaccaact

SEQ ID NO: 68917 - DNA, 50 bp, synthetic construct
  source 1..50: mol_type = other DNA
cttttgcaaacactacacatctcaaatgtgatgtgtagtgtttgcaaatt

SEQ ID NO: 68918 - DNA, 50 bp, synthetic construct
  source 1..50: mol_type = other DNA
ttttatcgtagtgttctaaagtatcattattatagaacactaaaataaat

SEQ ID NO: 68919 - DNA, 50 bp, synthetic construct
  source 1..50: mol_type = other DNA
tcgagtgtaggcatatccaacctgctaaggtaatatatacctacaccgcg

SEQ ID NO: 68920 - DNA, 50 bp, synthetic construct
  source 1..50: mol_type = other DNA
gttgcacgatcaaagggcaaggtgccccgtagatgacaaagatgggcact

SEQ ID NO: 68921 - DNA, 50 bp, synthetic construct
  source 1..50: mol_type = other DNA
gtgtggtagcgtatggggagttcgaacgcaccccccaaaccaccgggtgc

SEQ ID NO: 68922 - DNA, 50 bp, synthetic construct
  source 1..50: mol_type = other DNA
cttaatttaattagcccatatatcgacatgttgtggctaattaatttatc

SEQ ID NO: 68923 - DNA, 50 bp, synthetic construct
  source 1..50: mol_type = other DNA
gtgtggtagcatgtggggagttcgaacgcaccccccaaaccaccgggtgc

SEQ ID NO: 68924 - DNA, 50 bp, synthetic construct
  source 1..50: mol_type = other DNA
ctcgaccatcagaaagagcttgcattagcctgcctatcctaaatgcacga

SEQ ID NO: 68925 - DNA, 50 bp, synthetic construct
  source 1..50: mol_type = other DNA
ctatgagaaaaacatcataaaagcgcttttatattattcttttcgtgcaa

SEQ ID NO: 68926 - DNA, 50 bp, synthetic construct
  source 1..50: mol_type = other DNA
tgattcgcgggggaatgtagcacaattgtgctacattaatccggcactcg

SEQ ID NO: 68927 - DNA, 50 bp, synthetic construct
  source 1..50: mol_type = other DNA
gtgtggtagcgagtggggagttcgaacgcaccccccaaaccaccgggtgc

SEQ ID NO: 68928 - DNA, 50 bp, synthetic construct
  source 1..50: mol_type = other DNA
aaaccgcagtgatgaggagatggatttccataccctctttagtagcggtt

SEQ ID NO: 68929 - DNA, 50 bp, synthetic construct
  source 1..50: mol_type = other DNA
tataaaaaaccgcactcttaaccgatatcataaatgatgcggttttttca

SEQ ID NO: 68930 - DNA, 50 bp, synthetic construct
  source 1..50: mol_type = other DNA
tagttatttttcaaaaaccgcatcatgatgcggttttttcagccgcttca

SEQ ID NO: 68931 - DNA, 50 bp, synthetic construct
  source 1..50: mol_type = other DNA
aattatataattaaaaaccgcatcatgatgcggttttttcagccgcttca

SEQ ID NO: 68932 - DNA, 50 bp, synthetic construct
  source 1..50: mol_type = other DNA
cggcattttgccatgtaataatattgatattatagcatgtggccccgcga

SEQ ID NO: 68933 - DNA, 50 bp, synthetic construct
  source 1..50: mol_type = other DNA
ggttcaatatttcatctgttaagggtactctaagggacgaatcgtgtttt

SEQ ID NO: 68934 - DNA, 50 bp, synthetic construct
  source 1..50: mol_type = other DNA
agttgtacctgcaaatgtgttgtcactatttaacattagtaagtactact

SEQ ID NO: 68935 - DNA, 50 bp, synthetic construct
  source 1..50: mol_type = other DNA
cttcggacgtcgtccagacggacctggcttgatctggcgtctgcccttgt

SEQ ID NO: 68936 - DNA, 50 bp, synthetic construct
  source 1..50: mol_type = other DNA
tgtgtttcgatgggtgtataatattaagtgtgtcaacccatcaatacaat

SEQ ID NO: 68937 - DNA, 50 bp, synthetic construct
  source 1..50: mol_type = other DNA
tttagtttctcgttttctctcgttggagggagatgaaatgggatacaaaa

SEQ ID NO: 68938 - DNA, 50 bp, synthetic construct
  source 1..50: mol_type = other DNA
gttttcttcaatcatatctttcgtgcacgaaaaatttcggatcatctttt

SEQ ID NO: 68939 - DNA, 50 bp, synthetic construct
  source 1..50: mol_type = other DNA
cttggaatacggggattgtagtccatggggcaatatctccctcatccatc

SEQ ID NO: 68940 - DNA, 50 bp, synthetic construct
  source 1..50: mol_type = other DNA
tttagattaatgagtacactacctattggttgtgtactcataatactaaa

SEQ ID NO: 68941 - DNA, 50 bp, synthetic construct
  source 1..50: mol_type = other DNA
gccgttctttttgtgtattttcgtatacgaaaaaaggcgtaaagcgccta

SEQ ID NO: 68942 - DNA, 50 bp, synthetic construct
  source 1..50: mol_type = other DNA
ttttacataatttcgtatattagatacctaatatacgaaaaaaggcgtaa

SEQ ID NO: 68943 - DNA, 50 bp, synthetic construct
  source 1..50: mol_type = other DNA
ttttacataatttcatatattagatacctaatatacgaaaaaaggcgtaa

SEQ ID NO: 68944 - DNA, 50 bp, synthetic construct
  source 1..50: mol_type = other DNA
tttagtttctcgattcgtctccgtccagagagaggaattgaggtactaaa

SEQ ID NO: 68945 - DNA, 50 bp, synthetic construct
  source 1..50: mol_type = other DNA
gtttatttagattgtttagttcctcgagatactaatccataataataaac

SEQ ID NO: 68946 - DNA, 50 bp, synthetic construct
  source 1..50: mol_type = other DNA
atacttccttatgagcatcgcccattaggcagtgtctcataaggaagtaa

SEQ ID NO: 68947 - DNA, 50 bp, synthetic construct
  source 1..50: mol_type = other DNA
tgacatcaatacaaccgtctcaacgttttgagaggaggggatagctatca

SEQ ID NO: 68948 - DNA, 50 bp, synthetic construct
  source 1..50: mol_type = other DNA
ttctgttatttagtcaagctaatcaaaataagttagagttaataacatta

SEQ ID NO: 68949 - DNA, 50 bp, synthetic construct
  source 1..50: mol_type = other DNA
aatgctgtaatacaaatttccattttatgcaaacattgcattacagcaat

SEQ ID NO: 68950 - DNA, 50 bp, synthetic construct
  source 1..50: mol_type = other DNA
cgtataggtatagtatccctcggctgcccgtaggaaagtaaaaatatatc

SEQ ID NO: 68951 - DNA, 50 bp, synthetic construct
  source 1..50: mol_type = other DNA
gtctcattaatccacctcatcatccaaatgttgaggcaaattaatttcta

SEQ ID NO: 68952 - DNA, 50 bp, synthetic construct
  source 1..50: mol_type = other DNA
cattttctaccaaatctacctgtgatgagtagatcaataggtagaaatct

SEQ ID NO: 68953 - DNA, 50 bp, synthetic construct
  source 1..50: mol_type = other DNA
gattttatacaaatcgctccgctcatgacaagcgcttttcgtataaaatg

SEQ ID NO: 68954 - DNA, 50 bp, synthetic construct
  source 1..50: mol_type = other DNA
gtttgtgaaatcgctcgtaaatcgcgcgctttatgagctatataatagat

SEQ ID NO: 68955 - DNA, 50 bp, synthetic construct
  source 1..50: mol_type = other DNA
gctatacgaacaggttatgcctgtatgaaggcgtagtcaattcgtataaa

SEQ ID NO: 68956 - DNA, 50 bp, synthetic construct
  source 1..50: mol_type = other DNA
tttatacgaattgactacgccttcatacaggcataacctgttcgtatagc

SEQ ID NO: 68957 - DNA, 50 bp, synthetic construct
  source 1..50: mol_type = other DNA
tttaatatttactctgtaaatacattatgatttgccgagtgatttattga

SEQ ID NO: 68958 - DNA, 50 bp, synthetic construct
  source 1..50: mol_type = other DNA
attatacgtccgacttgatcagcacgatttgatcaagacggtagcgttta

SEQ ID NO: 68959 - DNA, 50 bp, synthetic construct
  source 1..50: mol_type = other DNA
gtatttctacaaaaacctccactgatgagtggattcatttgtagaaatat

SEQ ID NO: 68960 - DNA, 50 bp, synthetic construct
  source 1..50: mol_type = other DNA
tgtatattttaagagtcgttagggcaccctagtgatacaaaccctacacg

SEQ ID NO: 68961 - DNA, 50 bp, synthetic construct
  source 1..50: mol_type = other DNA
ttcggctattatgaccagaacggacctccgctaccaacgaaatagccgac

SEQ ID NO: 68962 - DNA, 50 bp, synthetic construct
  source 1..50: mol_type = other DNA
atattacgttttaaggggaatagtgcaatattaacctttttaataaatgc

SEQ ID NO: 68963 - DNA, 50 bp, synthetic construct
  source 1..50: mol_type = other DNA
ctccctcttgatttgcatactaatcaataagtatgcaagcctgaaacact

SEQ ID NO: 68964 - DNA, 50 bp, synthetic construct
  source 1..50: mol_type = other DNA
tatatgagcaatgcccgtaaatactagtattttgtgcattttacaataat

SEQ ID NO: 68965 - DNA, 50 bp, synthetic construct
  source 1..50: mol_type = other DNA
aatcgggtgttattgggggttgactaatgtccccacaataacacgagggg

SEQ ID NO: 68966 - DNA, 50 bp, synthetic construct
  source 1..50: mol_type = other DNA
cccgaaactctagacacttacaacaaagtgtgtgtgtctgaaattttggg

SEQ ID NO: 68967 - DNA, 50 bp, synthetic construct
  source 1..50: mol_type = other DNA
tctacacgtgtcagcagtcctacacacatgcgttgaaagtacactctgta

SEQ ID NO: 68968 - DNA, 50 bp, synthetic construct
  source 1..50: mol_type = other DNA
tgtatcaaaatcagtagtcaaaccgaagtgtgagttctgaaattgataca

SEQ ID NO: 68969 - DNA, 50 bp, synthetic construct
  source 1..50: mol_type = other DNA
aaagtgtgaattttagatactcttatcaatgtatctaaatatcttaattt

SEQ ID NO: 68970 - DNA, 50 bp, synthetic construct
  source 1..50: mol_type = other DNA
tgcagcaagagctcaccgaactacgcttaattctaccatctgacgctgca

SEQ ID NO: 68971 - DNA, 50 bp, synthetic construct
  source 1..50: mol_type = other DNA
gcagaaggcttttcaatacatgaaatttcatgtatagatcgctatttgaa

SEQ ID NO: 68972 - DNA, 50 bp, synthetic construct
  source 1..50: mol_type = other DNA
ggaaaataaaaaaggaggcgattttagtagcacaagcaggagtacttacg

SEQ ID NO: 68973 - DNA, 50 bp, synthetic construct
  source 1..50: mol_type = other DNA
tcctaaaaattagtttgcgacaatattttgtcgctaaataaataaaaaag

SEQ ID NO: 68974 - DNA, 50 bp, synthetic construct
  source 1..50: mol_type = other DNA
gagctgacagcggttcggatttggatccgaaccagatcttcttagttgga

SEQ ID NO: 68975 - DNA, 50 bp, synthetic construct
  source 1..50: mol_type = other DNA
aattagtttacccttaatccctgtcaacatttttaaaaatcgacgaagat

SEQ ID NO: 68976 - DNA, 50 bp, synthetic construct
  source 1..50: mol_type = other DNA
catttataccgataattatacagttatttttacaattccctgcataaaaa

SEQ ID NO: 68977 - DNA, 50 bp, synthetic construct
  source 1..50: mol_type = other DNA
aaaaagtccttgacaagtagcaacagttatagaattaagaagaacacttc

SEQ ID NO: 68978 - DNA, 50 bp, synthetic construct
  source 1..50: mol_type = other DNA
aactgttatcataaaactgattattggttatcagtttgatgataatagtt

SEQ ID NO: 68979 - DNA, 50 bp, synthetic construct
  source 1..50: mol_type = other DNA
ggattttcattgtttggtgcggataacccaaatccgaaccatttcccttt

SEQ ID NO: 68980 - DNA, 50 bp, synthetic construct
  source 1..50: mol_type = other DNA
ccgagggaaatggttcggatttggatgaaaatccgaaccttttctcgata

SEQ ID NO: 68981 - DNA, 50 bp, synthetic construct
  source 1..50: mol_type = other DNA
aagatatgaacttaagtttggacaattgtccaaactaaatgtcaagcatc

SEQ ID NO: 68982 - DNA, 50 bp, synthetic construct
  source 1..50: mol_type = other DNA
ccgatgtcaggtgttctaatacatccggtggactcagcccgaacacgtgg

SEQ ID NO: 68983 - DNA, 50 bp, synthetic construct
  source 1..50: mol_type = other DNA
tggcacaagtcttttctcgttttttcacccaagaaaaaagaattgtgcca

SEQ ID NO: 68984 - DNA, 50 bp, synthetic construct
  source 1..50: mol_type = other DNA
tttcggttttcagaactggcgcttactgacgccctctactgaaaaccaaa

SEQ ID NO: 68985 - DNA, 50 bp, synthetic construct
  source 1..50: mol_type = other DNA
ggattttttaattgataaatattatataacgctaatgattaaacgaaagt

SEQ ID NO: 68986 - DNA, 50 bp, synthetic construct
  source 1..50: mol_type = other DNA
ttttatggaaattatagagcgttttaaaattcttgatttgagcataaaaa

SEQ ID NO: 68987 - DNA, 50 bp, synthetic construct
  source 1..50: mol_type = other DNA
gtgacaaatttactttcttgcattgaaaatagcgtaactaaatttatcaa

SEQ ID NO: 68988 - DNA, 50 bp, synthetic construct
  source 1..50: mol_type = other DNA
gattcgtaaaaggcaaggttctttttgcgaacccttctgcacgctgttat

SEQ ID NO: 68989 - DNA, 50 bp, synthetic construct
  source 1..50: mol_type = other DNA
tgaccaacgagccatcaaagtatcagcgaacactgataactaaaaatcaa

SEQ ID NO: 68990 - DNA, 50 bp, synthetic construct
  source 1..50: mol_type = other DNA
gaatttaaaattaataatggtttaattaaacctttatgatattatagact

SEQ ID NO: 68991 - DNA, 50 bp, synthetic construct
  source 1..50: mol_type = other DNA
agattgtatgattaaattgatagcaaaattgatacaatagaatataaaga

SEQ ID NO: 68992 - DNA, 50 bp, synthetic construct
  source 1..50: mol_type = other DNA
aaattgtattctcaaggaacagactagtgttgctacaacgaagcaacggg

SEQ ID NO: 68993 - DNA, 50 bp, synthetic construct
  source 1..50: mol_type = other DNA
gttgtagcaacactacgcactccacgtgtgttgtctggtccttgagaata

SEQ ID NO: 68994 - DNA, 50 bp, synthetic construct
  source 1..50: mol_type = other DNA
aatgagttagtttaatgtgtagaaatttctgcacatctaagtagaatcat

SEQ ID NO: 68995 - DNA, 50 bp, synthetic construct
  source 1..50: mol_type = other DNA
cctttgctattaagtaacaatatcacattattgtttcatatgtaaaaagc

SEQ ID NO: 68996 - DNA, 50 bp, synthetic construct
  source 1..50: mol_type = other DNA
aatacaggatttcaagccttactttcaacatgtgtttgaactactatatg

SEQ ID NO: 68997 - DNA, 50 bp, synthetic construct
  source 1..50: mol_type = other DNA
aacacattgatattaatggtttttaaaaaagcattgcttatcaatttgtt

SEQ ID NO: 68998 - DNA, 50 bp, synthetic construct
  source 1..50: mol_type = other DNA
acccatttttgtagttatgcactgtatagtgataacttacattttgtagt

SEQ ID NO: 68999 - DNA, 50 bp, synthetic construct
  source 1..50: mol_type = other DNA
gccactgtgtttggggaatagacattatcgtattccctgaactttggtaa

SEQ ID NO: 69000 - DNA, 50 bp, synthetic construct
  source 1..50: mol_type = other DNA
gagtgcagatttgtttgtttactatacgttatacaaacaaattaacggga

SEQ ID NO: 69001 - DNA, 50 bp, synthetic construct
  source 1..50: mol_type = other DNA
gcttcgttgtagcaacactacgcactccacatgtgttgataggtattacc

SEQ ID NO: 69002 - DNA, 50 bp, synthetic construct
  source 1..50: mol_type = other DNA
tgttacgacaaaggtggctcagggttcgcaggaacacctatgtcgtaact

SEQ ID NO: 69003 - DNA, 50 bp, synthetic construct
  source 1..50: mol_type = other DNA
ttgagtaaataaaaatatttaccctagggtaaacatatattacttaataa

SEQ ID NO: 69004 - DNA, 50 bp, synthetic construct
  source 1..50: mol_type = other DNA
acgatttcactctttgtatcaacgctgcgggagtcaaaaggtccagtgga

SEQ ID NO: 69005 - DNA, 50 bp, synthetic construct
  source 1..50: mol_type = other DNA
tgtgcgctcaaggacggttacggattcaacatgccacgagctgagttggt

SEQ ID NO: 69006 - DNA, 50 bp, synthetic construct
  source 1..50: mol_type = other DNA
agaagagttcgacgcttcctcttttggttgagctgagggggaagcagtcg

SEQ ID NO: 69007 - DNA, 50 bp, synthetic construct
  source 1..50: mol_type = other DNA
caacgcatgaggggaactggctacatggagtacagtttatagtagtgtat

SEQ ID NO: 69008 - DNA, 50 bp, synthetic construct
  source 1..50: mol_type = other DNA
ttcattaaagggtatttctatttaatttagcaggaataattagccagatt

SEQ ID NO: 69009 - DNA, 50 bp, synthetic construct
  source 1..50: mol_type = other DNA
aacctgcaatactgttggtaataaagttattaccaacactatgacatttt

SEQ ID NO: 69010 - DNA, 50 bp, synthetic construct
  source 1..50: mol_type = other DNA
ctctcataaaaaaatatcatcacttaagtgaatgatattgctgaatacaa

SEQ ID NO: 69011 - DNA, 50 bp, synthetic construct
  source 1..50: mol_type = other DNA
tcagtagtgttattgacataagtttaaacatatgttaatatcactactaa

SEQ ID NO: 69012 - DNA, 50 bp, synthetic construct
  source 1..50: mol_type = other DNA
ttacactccagcaatatgcacacctagatgtgcaacttggttataattag

SEQ ID NO: 69013 - DNA, 50 bp, synthetic construct
  source 1..50: mol_type = other DNA
ggtttatgtcgtactcaatcaataattatagtttaagtacaacaaaaaaa

SEQ ID NO: 69014 - DNA, 50 bp, synthetic construct
  source 1..50: mol_type = other DNA
atcaatacgacactctcaacatgatgtctggtccttgagaatacattttt

SEQ ID NO: 69015 - DNA, 50 bp, synthetic construct
  source 1..50: mol_type = other DNA
attgatagcaacagatatggatggaacatattgagatatttggcaccctc

SEQ ID NO: 69016 - DNA, 50 bp, synthetic construct
  source 1..50: mol_type = other DNA
ttttttaaataaagatttcaccagatctggtgaaacttttatttttccgt

SEQ ID NO: 69017 - DNA, 50 bp, synthetic construct
  source 1..50: mol_type = other DNA
ttcgcaaatgttcccagattatacaataggaacatttgtaaatctcaaaa

SEQ ID NO: 69018 - DNA, 50 bp, synthetic construct
  source 1..50: mol_type = other DNA
aatatttggaggaattgtcgcaattaattgcaacattttggcatcatatt

SEQ ID NO: 69019 - DNA, 50 bp, synthetic construct
  source 1..50: mol_type = other DNA
ttcctttttacatgaaataaaaaacattttttatttcatgtgttgaaaag

SEQ ID NO: 69020 - DNA, 50 bp, synthetic construct
  source 1..50: mol_type = other DNA
aaaggccgctaagaattgagtgcaaatccacccatctagcagggagggta

SEQ ID NO: 69021 - DNA, 50 bp, synthetic construct
  source 1..50: mol_type = other DNA
gttatgttctacacccttaacgggtcgccggttaatgggatgaacataac

SEQ ID NO: 69022 - DNA, 50 bp, synthetic construct
  source 1..50: mol_type = other DNA
tttatgtcgtactcaatcaataattcattatagtttaggtacaacaaaaa

SEQ ID NO: 69023 - DNA, 50 bp, synthetic construct
  source 1..50: mol_type = other DNA
tttagtatctcgttatctctcgttggaagaagaagaaacgagataccaaa

SEQ ID NO: 69024 - DNA, 50 bp, synthetic construct
  source 1..50: mol_type = other DNA
gtttttttacgttgtttagtacctcgagaaactaaaattataaataaaaa

SEQ ID NO: 69025 - DNA, 50 bp, synthetic construct
  source 1..50: mol_type = other DNA
gggccgcgagtccggcgacggcgaggaagagcgggcgggagtcgtccacg

SEQ ID NO: 69026 - DNA, 50 bp, synthetic construct
  source 1..50: mol_type = other DNA
tgttaaagatttatgttcctatactagtgttgctacaacgagcagatacg

SEQ ID NO: 69027 - DNA, 50 bp, synthetic construct
  source 1..50: mol_type = other DNA
tacatcaattctatcaactcgtcccatgtggagttggttgcattgatgtc

SEQ ID NO: 69028 - DNA, 50 bp, synthetic construct
  source 1..50: mol_type = other DNA
tttagtgcctcatttcctctcgttggagggagaagaaacgggataccaaa

SEQ ID NO: 69029 - DNA, 50 bp, synthetic construct
  source 1..50: mol_type = other DNA
tttagtgcctcatttcctctcgttggacggagacgaatcgagaaactaaa

SEQ ID NO: 69030 - DNA, 50 bp, synthetic construct
  source 1..50: mol_type = other DNA
atacttccttatgagcacctaccattaggtagtgcctcataaggaagtaa

SEQ ID NO: 69031 - DNA, 50 bp, synthetic construct
  source 1..50: mol_type = other DNA
tttagtttctcgattcgtctccgtccaacgagaggaaatgaggcactaaa

SEQ ID NO: 69032 - DNA, 50 bp, synthetic construct
  source 1..50: mol_type = other DNA
tatggcttatgctaccttgccgaatattcgggttttgaaggtatctggtt

SEQ ID NO: 69033 - DNA, 50 bp, synthetic construct
  source 1..50: mol_type = other DNA
tagtcagtatctcgataaacagataaagcagtttttaaagatactgacta

SEQ ID NO: 69034 - DNA, 50 bp, synthetic construct
  source 1..50: mol_type = other DNA
cttttatttatagtttagtttctcatgagggactaaataatataaaaaaa

SEQ ID NO: 69035 - DNA, 50 bp, synthetic construct
  source 1..50: mol_type = other DNA
tttagtttctcgattcgtctccgtccagcgagagataacgaggtactaaa

SEQ ID NO: 69036 - DNA, 50 bp, synthetic construct
  source 1..50: mol_type = other DNA
tttagtctctcgatttctctcgctggacggagaataaacgagaaactaaa

SEQ ID NO: 69037 - DNA, 50 bp, synthetic construct
  source 1..50: mol_type = other DNA
agggtagatgatgaacggttgtactggtttagttggcagggatgtaccct

SEQ ID NO: 69038 - DNA, 50 bp, synthetic construct
  source 1..50: mol_type = other DNA
atgcttggctcttttttgtatgatatatacaaaataatattcccattttc

SEQ ID NO: 69039 - DNA, 50 bp, synthetic construct
  source 1..50: mol_type = other DNA
gtgtgttactctctcgtgttgatgggtgtcaaccccttactataaaattt

SEQ ID NO: 69040 - DNA, 50 bp, synthetic construct
  source 1..50: mol_type = other DNA
ttcgatgggtgtataatattagggaatcccaagtgtgtcaacccattatt

SEQ ID NO: 69041 - DNA, 50 bp, synthetic construct
  source 1..50: mol_type = other DNA
aactggtagtcaggagtgttggggtctcccaacacacggaactagtagtt

SEQ ID NO: 69042 - DNA, 50 bp, synthetic construct
  source 1..50: mol_type = other DNA
ttcagcacatcaggagaatgttttgtaaaacatcctgcgtctgacctgcg

SEQ ID NO: 69043 - DNA, 50 bp, synthetic construct
  source 1..50: mol_type = other DNA
cctatggttctgttggtccaagggcaggcttggaccaacgaagccataac

SEQ ID NO: 69044 - DNA, 50 bp, synthetic construct
  source 1..50: mol_type = other DNA
ttttagttttagggggttgacctcttattatacacccatcgaaacacgag

SEQ ID NO: 69045 - DNA, 50 bp, synthetic construct
  source 1..50: mol_type = other DNA
gactctccgtttcgttgatgtgggtacccactacaacattttttcgaaaa

SEQ ID NO: 69046 - DNA, 50 bp, synthetic construct
  source 1..50: mol_type = other DNA
aaatacaaaattaaactaggcaaaaggttgaccgcaaaaatattgtagtg

SEQ ID NO: 69047 - DNA, 50 bp, synthetic construct
  source 1..50: mol_type = other DNA
agtgcactacgtgttctttgcaaacaattgaaaaatatatttactgtaaa

SEQ ID NO: 69048 - DNA, 50 bp, synthetic construct
  source 1..50: mol_type = other DNA
gtcggatcgcagaagtatagggtttagacttcgatctagatttcgctttg

SEQ ID NO: 69049 - DNA, 50 bp, synthetic construct
  source 1..50: mol_type = other DNA
gtgtatcataagaaaggtataatcctgaacagacctttctattgatacac

SEQ ID NO: 69050 - DNA, 50 bp, synthetic construct
  source 1..50: mol_type = other DNA
tgtggcttctgaatgtagtgtgtgtaaacacactatgttttattcacatg

SEQ ID NO: 69051 - DNA, 50 bp, synthetic construct
  source 1..50: mol_type = other DNA
ctatacgaagttttaattgtttaaatttaaacaaatataacaaatatgat

SEQ ID NO: 69052 - DNA, 50 bp, synthetic construct
  source 1..50: mol_type = other DNA
aacccgaatagcctacattcaagggtcattgtatttgagctattcggcga

SEQ ID NO: 69053 - DNA, 50 bp, synthetic construct
  source 1..50: mol_type = other DNA
atgcacgtttagagagttactatgaccaatgcacatgtctaaacattatt

SEQ ID NO: 69054 - DNA, 50 bp, synthetic construct
  source 1..50: mol_type = other DNA
gtgtgagaataccacctgccagtctcgaatggtaggggtgaatctcacac

SEQ ID NO: 69055 - DNA, 50 bp, synthetic construct
  source 1..50: mol_type = other DNA
tctttgcaaatactacacatctcaaatgtgatgtgtagggattgcaaatt

SEQ ID NO: 69056 - DNA, 50 bp, synthetic construct
  source 1..50: mol_type = other DNA
atttaaaaaatctttatagtgggtatacccaccataacgaaacagcagtg

SEQ ID NO: 69057 - DNA, 50 bp, synthetic construct
  source 1..50: mol_type = other DNA
tatcaaataatccacctcacaatgcagatgttgaggtggattaatttatg

SEQ ID NO: 69058 - DNA, 50 bp, synthetic construct
  source 1..50: mol_type = other DNA
gtcggtgataaagatggtagcggaggaccgtcgtggtctttatcgccgac

SEQ ID NO: 69059 - DNA, 50 bp, synthetic construct
  source 1..50: mol_type = other DNA
atcaggtctgttgtcaacgctatgttcatggtatatacaaatgaccctcg

SEQ ID NO: 69060 - DNA, 50 bp, synthetic construct
  source 1..50: mol_type = other DNA
gtcggctgttgtgaccagaacggacctccgctaccaacaatacagccgac

SEQ ID NO: 69061 - DNA, 50 bp, synthetic construct
  source 1..50: mol_type = other DNA
ttatggatattaaaaaatttaccgaacggtaaactttattgtgtatcctt

SEQ ID NO: 69062 - DNA, 50 bp, synthetic construct
  source 1..50: mol_type = other DNA
gccatgagggtagtttagcgacatttgatctacctgcttcttgcctgcat

SEQ ID NO: 69063 - DNA, 50 bp, synthetic construct
  source 1..50: mol_type = other DNA
cgacgttagcgtttccggggtgactatacacccatcgaaacacgggaggg

SEQ ID NO: 69064 - DNA, 50 bp, synthetic construct
  source 1..50: mol_type = other DNA
gccatcgctatacgaattgactatgcgtaacctattcgtatagcgctaga

SEQ ID NO: 69065 - DNA, 50 bp, synthetic construct
  source 1..50: mol_type = other DNA
tgcaactatttgaaaccaccaggagtccaaggtgtctttaaacagttatg

SEQ ID NO: 69066 - DNA, 50 bp, synthetic construct
  source 1..50: mol_type = other DNA
aatatataaaacctcatttagatacataagtaaatgaggtttttctctct

SEQ ID NO: 69067 - DNA, 50 bp, synthetic construct
  source 1..50: mol_type = other DNA
taagcaccttagcaatacgaagcccagccttcattcttctaagctgctta

SEQ ID NO: 69068 - DNA, 50 bp, synthetic construct
  source 1..50: mol_type = other DNA
atcaaacacaattatctttttgcaattgcaaaaagataattacaaataaa

SEQ ID NO: 69069 - DNA, 50 bp, synthetic construct
  source 1..50: mol_type = other DNA
ttaaattaaacttcttttatgtattaacacataaaaaaaataaaccattg

SEQ ID NO: 69070 - DNA, 50 bp, synthetic construct
  source 1..50: mol_type = other DNA
ttcctactacggcctccacatgtgtccacatgtgtcgttcaaagtatagg

SEQ ID NO: 69071 - DNA, 50 bp, synthetic construct
  source 1..50: mol_type = other DNA
ttggatttctccaatacggctttttaaaatccactatttaatcctaaaaa

SEQ ID NO: 69072 - DNA, 50 bp, synthetic construct
  source 1..50: mol_type = other DNA
actcgtacttttatacatgatggacatgtttcctatgttaaagtacgata

SEQ ID NO: 69073 - DNA, 50 bp, synthetic construct
  source 1..50: mol_type = other DNA
aaatgttgcagttttattcacctagcaaggtgaacataaatgcaacattt

SEQ ID NO: 69074 - DNA, 50 bp, synthetic construct
  source 1..50: mol_type = other DNA
acgtagcaacgctacagtctcgacatgtctcattcttagtatatgaacac

SEQ ID NO: 69075 - DNA, 50 bp, synthetic construct
  source 1..50: mol_type = other DNA
ttttgcgttaggtgtacatcatgcctacatgatatacacctactttaaaa

SEQ ID NO: 69076 - DNA, 50 bp, synthetic construct
  source 1..50: mol_type = other DNA
tatcgtactttaacataggaaacatgtccatcatgtataaaaatacgacc

SEQ ID NO: 69077 - DNA, 50 bp, synthetic construct
  source 1..50: mol_type = other DNA
tacggtatttatatttgcgttgcagttccacgacaaatataaatacagta

SEQ ID NO: 69078 - DNA, 50 bp, synthetic construct
  source 1..50: mol_type = other DNA
aaaaagtcgtatttttatacatgatttcctatgttaaaatacgatatttt

SEQ ID NO: 69079 - DNA, 50 bp, synthetic construct
  source 1..50: mol_type = other DNA
tatcgtactttaacataggaaacatgtccatcatgtataaaagtacgagt

SEQ ID NO: 69080 - DNA, 50 bp, synthetic construct
  source 1..50: mol_type = other DNA
aatatttggaggaattgtcgcaattaattgcgatgttttggtatcatatt

SEQ ID NO: 69081 - DNA, 50 bp, synthetic construct
  source 1..50: mol_type = other DNA
tgtatcaatattatagtttatgtatgtctaagaactatgattttgataca

SEQ ID NO: 69082 - DNA, 50 bp, synthetic construct
  source 1..50: mol_type = other DNA
accttgatactgtatcataacattaaaatatatagacacataatcatggt

SEQ ID NO: 69083 - DNA, 50 bp, synthetic construct
  source 1..50: mol_type = other DNA
cgattaaactaattagtcgagggtttgaaatccactatttatatttgaac

SEQ ID NO: 69084 - DNA, 50 bp, synthetic construct
  source 1..50: mol_type = other DNA
ttctccacccttgacatcaagacaacagaatgaatgtcatttgagtatgt

SEQ ID NO: 69085 - DNA, 50 bp, synthetic construct
  source 1..50: mol_type = other DNA
accttgatactgtatcataacattaaaatatatggatacgtaatcatggt

SEQ ID NO: 69086 - DNA, 50 bp, synthetic construct
  source 1..50: mol_type = other DNA
accttgatactgtatcataacaataaaatatatggatacgtaatcatggt

SEQ ID NO: 69087 - DNA, 50 bp, synthetic construct
  source 1..50: mol_type = other DNA
tattagcatcaattttagatgtattggtacatctgaaattatgtctaaaa

SEQ ID NO: 69088 - DNA, 50 bp, synthetic construct
  source 1..50: mol_type = other DNA
tattgcatttgagtgtcgcatgcatgttccactgtcactcaaacacaata

SEQ ID NO: 69089 - DNA, 50 bp, synthetic construct
  source 1..50: mol_type = other DNA
aatcttctttactaacaccatacgaccgaatgtttgaataaaaaagaatt

SEQ ID NO: 69090 - DNA, 50 bp, synthetic construct
  source 1..50: mol_type = other DNA
aatatttggagaaattgtcgcaattaactgcaatgttttggtatcatatt

SEQ ID NO: 69091 - DNA, 50 bp, synthetic construct
  source 1..50: mol_type = other DNA
tattgtgtttgagtgacagcggaacatgcatgcgacactcaaatgcaata

SEQ ID NO: 69092 - DNA, 50 bp, synthetic construct
  source 1..50: mol_type = other DNA
tgcagcaatttcagatgtattgcacatgcggtacatctgaaattgatgct

SEQ ID NO: 69093 - DNA, 50 bp, synthetic construct
  source 1..50: mol_type = other DNA
atttttttgtttatagacttgtctttagacaagtcagtgatatgattgat

SEQ ID NO: 69094 - DNA, 50 bp, synthetic construct
  source 1..50: mol_type = other DNA
tgtgactattaattgtgtttatcctaggataaacacaattaattgaacca

SEQ ID NO: 69095 - DNA, 50 bp, synthetic construct
  source 1..50: mol_type = other DNA
ccatttcaaatcattgcgtacttgtacaagaactcattaactataaaaca

SEQ ID NO: 69096 - DNA, 50 bp, synthetic construct
  source 1..50: mol_type = other DNA
ggtttaatccaactacatacaacatatgttgtatgcaaattatttaattc

SEQ ID NO: 69097 - DNA, 50 bp, synthetic construct
  source 1..50: mol_type = other DNA
agatttcaaacattacttgcgacgtacgtgtgtttgagctactatgtgaa

SEQ ID NO: 69098 - DNA, 50 bp, synthetic construct
  source 1..50: mol_type = other DNA
agttaatccctaattgaacgctccaaggtgacttccaatagggatttatt

SEQ ID NO: 69099 - DNA, 50 bp, synthetic construct
  source 1..50: mol_type = other DNA
tacatacaacttattgtgtgtaatgaaatatatctagtatgttgtatgta

SEQ ID NO: 69100 - DNA, 50 bp, synthetic construct
  source 1..50: mol_type = other DNA
attcaattacatacaacacgttagattcaatatgttgtatgtaatgaaat

SEQ ID NO: 69101 - DNA, 50 bp, synthetic construct
  source 1..50: mol_type = other DNA
agttgtctttttattcacacagcatgtccaatatgaataaaagaacaaca

SEQ ID NO: 69102 - DNA, 50 bp, synthetic construct
  source 1..50: mol_type = other DNA
attatcagatttgtaaagttagcatctcctctcgttctaaaactgatata

SEQ ID NO: 69103 - DNA, 50 bp, synthetic construct
  source 1..50: mol_type = other DNA
ctcacaacatacaatttggctcctcgaaatccgaactttttttaccgaaa

SEQ ID NO: 69104 - DNA, 50 bp, synthetic construct
  source 1..50: mol_type = other DNA
tccaattctatccaaaacctcatttaagtgaggttttagttatacataac

SEQ ID NO: 69105 - DNA, 50 bp, synthetic construct
  source 1..50: mol_type = other DNA
gtggaacctttaacctaacacatctggatgtgttctgcgatacgttccat

SEQ ID NO: 69106 - DNA, 50 bp, synthetic construct
  source 1..50: mol_type = other DNA
agcatccagttctctgaactgtccgaatacagatttgggcacttcaacag

SEQ ID NO: 69107 - DNA, 50 bp, synthetic construct
  source 1..50: mol_type = other DNA
aatttacatcttttgtatcaacgctacgcactcgacgtgcgttgtctttt

SEQ ID NO: 69108 - DNA, 50 bp, synthetic construct
  source 1..50: mol_type = other DNA
ttagtaataatgggttgacacacttaatattatacacccatcgaaacaca

SEQ ID NO: 69109 - DNA, 50 bp, synthetic construct
  source 1..50: mol_type = other DNA
attagtggattcatgcagcacttcttgatatgatggagaaatacactaaa

SEQ ID NO: 69110 - DNA, 50 bp, synthetic construct
  source 1..50: mol_type = other DNA
ttagttattggggtttacaacatttaatatcatgtacccacaataacacg

SEQ ID NO: 69111 - DNA, 50 bp, synthetic construct
  source 1..50: mol_type = other DNA
aatattgtcatgtcaagacatgtggaagcatgttgagacagtagcattgc

SEQ ID NO: 69112 - DNA, 50 bp, synthetic construct
  source 1..50: mol_type = other DNA
caaagagttctaggctttaacaagcagccattgggtaatcagcctctttg

SEQ ID NO: 69113 - DNA, 50 bp, synthetic construct
  source 1..50: mol_type = other DNA
tacgttaaattgtatcaattaacttcaatttaatcatacaatctaaccat

SEQ ID NO: 69114 - DNA, 50 bp, synthetic construct
  source 1..50: mol_type = other DNA
tagttacactacctttgtgttaactcgattgtttcaagttggtctaaata

SEQ ID NO: 69115 - DNA, 50 bp, synthetic construct
  source 1..50: mol_type = other DNA
accgcatcattatctgatacgcagaaaaataaattgtatataacttactt

SEQ ID NO: 69116 - DNA, 50 bp, synthetic construct
  source 1..50: mol_type = other DNA
tcggtctggggtctaatgctctactaggcaaccattagaccccatatgta

SEQ ID NO: 69117 - DNA, 50 bp, synthetic construct
  source 1..50: mol_type = other DNA
ttagtattagggggttgcggcatttaatattatacacccatcgaaacaca

SEQ ID NO: 69118 - DNA, 50 bp, synthetic construct
  source 1..50: mol_type = other DNA
tttatttagcttgtttagtacctcgagggagaagaaacgggataccaaaa

SEQ ID NO: 69119 - DNA, 50 bp, synthetic construct
  source 1..50: mol_type = other DNA
gtcctctggggaatgttgctgaacgttactcaccccagatgtgcgaggtg

SEQ ID NO: 69120 - DNA, 50 bp, synthetic construct
  source 1..50: mol_type = other DNA
tgtagcaacactacgcactccacgtgtgttgtctggtccttgagaataca

SEQ ID NO: 69121 - DNA, 50 bp, synthetic construct
  source 1..50: mol_type = other DNA
ggttcttttttatttcgcaatccctagtgtttgcaaatattaaaacaata

SEQ ID NO: 69122 - DNA, 50 bp, synthetic construct
  source 1..50: mol_type = other DNA
tggtatctttaactttgggaaactccggtatcacatagttaaagatattg

SEQ ID NO: 69123 - DNA, 50 bp, synthetic construct
  source 1..50: mol_type = other DNA
tagtgtatttagaccttgatgattttaattaggcacgtttaaatacacta

SEQ ID NO: 69124 - DNA, 50 bp, synthetic construct
  source 1..50: mol_type = other DNA
ccctaatcatcatcatagtgcatttaaatacactacctaaagcgatacaa

SEQ ID NO: 69125 - DNA, 50 bp, synthetic construct
  source 1..50: mol_type = other DNA
ttatggctaatgctacaatgccgaattcggtttctaagagttaatccctt

SEQ ID NO: 69126 - DNA, 50 bp, synthetic construct
  source 1..50: mol_type = other DNA
ttgtatcgttttagatggtgtatttaaatacactataaggatgattaggg

SEQ ID NO: 69127 - DNA, 50 bp, synthetic construct
  source 1..50: mol_type = other DNA
tttacaggtctcttaggaaaccgaattcggcattgtagcattagccataa

SEQ ID NO: 69128 - DNA, 50 bp, synthetic construct
  source 1..50: mol_type = other DNA
taaggggtgttttaggaagtgaaaatcttcactttcttatgcaccctgtg

SEQ ID NO: 69129 - DNA, 50 bp, synthetic construct
  source 1..50: mol_type = other DNA
aaaattttagttattggggtttacaatgtccccacaataacacgaggggg

SEQ ID NO: 69130 - DNA, 50 bp, synthetic construct
  source 1..50: mol_type = other DNA
cccctcgtgttattgtggggacattagtcaacccccaataacacccgatt

SEQ ID NO: 69131 - DNA, 50 bp, synthetic construct
  source 1..50: mol_type = other DNA
ttttgatagctatcaaggcaactcgacggtagtattgatgtcaagggtag

SEQ ID NO: 69132 - DNA, 50 bp, synthetic construct
  source 1..50: mol_type = other DNA
tgttaggggtttacgaatcttgggttgcctaatatcatgtacccatcaac

SEQ ID NO: 69133 - DNA, 50 bp, synthetic construct
  source 1..50: mol_type = other DNA
agtttggacaataaacataccgtctcaacgtgttcactgttgtccaaacc

SEQ ID NO: 69134 - DNA, 50 bp, synthetic construct
  source 1..50: mol_type = other DNA
taataatatatggaaaattgtctacgaagattgttaagaaataatattta

SEQ ID NO: 69135 - DNA, 50 bp, synthetic construct
  source 1..50: mol_type = other DNA
ctctcgtgtgttgatgggtacatgatccgaacgtagtcaacccccaataa

SEQ ID NO: 69136 - DNA, 50 bp, synthetic construct
  source 1..50: mol_type = other DNA
acaggtatgttctcatgatgtatttaaacacatcattttgggtattgaat

SEQ ID NO: 69137 - DNA, 50 bp, synthetic construct
  source 1..50: mol_type = other DNA
tgtggttggaatgatatgttaggcaaccccataggtcaataccaccacaa

SEQ ID NO: 69138 - DNA, 50 bp, synthetic construct
  source 1..50: mol_type = other DNA
ccccctcgtgttattgtggggacattgtaaaccccaataactaaaatttt

SEQ ID NO: 69139 - DNA, 50 bp, synthetic construct
  source 1..50: mol_type = other DNA
gttctcatagtgtatttagaccttgacacgtttaaatacaccatctaaag

SEQ ID NO: 69140 - DNA, 50 bp, synthetic construct
  source 1..50: mol_type = other DNA
tttacaggtttcttagaaaaccgaattcggcattgtagcattagccataa

SEQ ID NO: 69141 - DNA, 50 bp, synthetic construct
  source 1..50: mol_type = other DNA
tgttaggggtttacgaatcttgggttccctaatatcatgtacccatcaac

SEQ ID NO: 69142 - DNA, 50 bp, synthetic construct
  source 1..50: mol_type = other DNA
ttgtatcgttttagatggtgtatttaaatacactatgaggtagattaggg

SEQ ID NO: 69143 - DNA, 50 bp, synthetic construct
  source 1..50: mol_type = other DNA
gtggttgtcctagtgcagtgtagttacctacacttaaatcaaaaaactta

SEQ ID NO: 69144 - DNA, 50 bp, synthetic construct
  source 1..50: mol_type = other DNA
cttaattggtgttacccataagccacgttttagaattttgtttaattttt

SEQ ID NO: 69145 - DNA, 50 bp, synthetic construct
  source 1..50: mol_type = other DNA
tattgtgggtacatgatattaggaaacccgaacgtagtcaacccccaata

SEQ ID NO: 69146 - DNA, 50 bp, synthetic construct
  source 1..50: mol_type = other DNA
ggcttttccttaaaatcattttttatcaatattgaatttaaataaaagag

SEQ ID NO: 69147 - DNA, 50 bp, synthetic construct
  source 1..50: mol_type = other DNA
ggtcaagatgacgctttactagttagtgatagtaaagcggaagtttgata

SEQ ID NO: 69148 - DNA, 50 bp, synthetic construct
  source 1..50: mol_type = other DNA
cgcataaaagattaaaccgtattcaagaacaaggttttaacttttatgcc

SEQ ID NO: 69149 - DNA, 50 bp, synthetic construct
  source 1..50: mol_type = other DNA
atggcattccgagtgttgtgtggttatacacactaaaaataaaagacaat

SEQ ID NO: 69150 - DNA, 50 bp, synthetic construct
  source 1..50: mol_type = other DNA
gtcggctgttgttgtggtagcgggagaccgttctggtttcgacagccgac

SEQ ID NO: 69151 - DNA, 50 bp, synthetic construct
  source 1..50: mol_type = other DNA
tagaaaactgtgtatatttttgggatataaaccctacacgtggattatta

SEQ ID NO: 69152 - DNA, 50 bp, synthetic construct
  source 1..50: mol_type = other DNA
cgaggtcacttatgaaaaagctgggaccagctttgtactaagtgacacta

SEQ ID NO: 69153 - DNA, 50 bp, synthetic construct
  source 1..50: mol_type = other DNA
ttatagtcatgttttgcagtagacatcttaactgcattgtttatcattag

SEQ ID NO: 69154 - DNA, 50 bp, synthetic construct
  source 1..50: mol_type = other DNA
tagtgggtaattaacactcctacagacgtaagagagttaaatacccacta

SEQ ID NO: 69155 - DNA, 50 bp, synthetic construct
  source 1..50: mol_type = other DNA
ttttgtgtattttcgtatattaggtacctaatatacgaaaaaaggcgtaa

SEQ ID NO: 69156 - DNA, 50 bp, synthetic construct
  source 1..50: mol_type = other DNA
cggctctcaccggacgcttacgcaactccgtaagcatccggtgaaggccg

SEQ ID NO: 69157 - DNA, 50 bp, synthetic construct
  source 1..50: mol_type = other DNA
ttgttatagctaaataatatgtctttatacgtattgtttacgtataacta

SEQ ID NO: 69158 - DNA, 50 bp, synthetic construct
  source 1..50: mol_type = other DNA
aggtgaacatctaaagaaagccgaattcggcattgtagcattagccataa

SEQ ID NO: 69159 - DNA, 50 bp, synthetic construct
  source 1..50: mol_type = other DNA
gttgatgggtacatgatattagggaacccgaacgtagtcaacccccaata

SEQ ID NO: 69160 - DNA, 50 bp, synthetic construct
  source 1..50: mol_type = other DNA
aacctcatagtgtatttagacattgacacgtttaaatacaccatctaaaa

SEQ ID NO: 69161 - DNA, 50 bp, synthetic construct
  source 1..50: mol_type = other DNA
tttaaattatttatgtgattttgtcacttaaggtgaataagttgtatatt

SEQ ID NO: 69162 - DNA, 50 bp, synthetic construct
  source 1..50: mol_type = other DNA
ttgtatcgctttaggtggtgtatttaaatacactatgaggatgattatgg

SEQ ID NO: 69163 - DNA, 50 bp, synthetic construct
  source 1..50: mol_type = other DNA
gttttgtggaggttgctgtccgcctcgtggaacatcaacctgtacacaac

SEQ ID NO: 69164 - DNA, 50 bp, synthetic construct
  source 1..50: mol_type = other DNA
gaatcgccatgtgtgtaaagtacaccggcggtttactaccacgatgcaaa

SEQ ID NO: 69165 - DNA, 50 bp, synthetic construct
  source 1..50: mol_type = other DNA
ctttagatggtgtatttaaacgtgtcaaggtctaaatacactatgaggtt

SEQ ID NO: 69166 - DNA, 50 bp, synthetic construct
  source 1..50: mol_type = other DNA
acaggtatgttctcatggtgtatttaaccacatcattttaggtattgaat

SEQ ID NO: 69167 - DNA, 50 bp, synthetic construct
  source 1..50: mol_type = other DNA
aaataggaaaaagaataaacatcagcgtcaactttttctcattaataatt

SEQ ID NO: 69168 - DNA, 50 bp, synthetic construct
  source 1..50: mol_type = other DNA
ccaaatccaactccataacctaaatatatgttgtataatagtttacttgt

SEQ ID NO: 69169 - DNA, 50 bp, synthetic construct
  source 1..50: mol_type = other DNA
agttatattttttcctgccatattacaccatcaagcttattaatagctct

SEQ ID NO: 69170 - DNA, 50 bp, synthetic construct
  source 1..50: mol_type = other DNA
caaagaaggctttgaaagtgatacatatatatttttcaaagaactccttt

SEQ ID NO: 69171 - DNA, 50 bp, synthetic construct
  source 1..50: mol_type = other DNA
tagcttctgtatgaccaacataaaattatgatttgaacataatggaaatt

SEQ ID NO: 69172 - DNA, 50 bp, synthetic construct
  source 1..50: mol_type = other DNA
aggaaagataataaagaaagaatttaaatcttttttattatatctttcct

SEQ ID NO: 69173 - DNA, 50 bp, synthetic construct
  source 1..50: mol_type = other DNA
ggaacctgagctcgtgagacgcctgggaaggtcaggggcgctgaggcgcc

SEQ ID NO: 69174 - DNA, 50 bp, synthetic construct
  source 1..50: mol_type = other DNA
agagtaattttagaaaccttgattgaaatggcagtttctaaagttattta

SEQ ID NO: 69175 - DNA, 50 bp, synthetic construct
  source 1..50: mol_type = other DNA
acacctattcttactgctcctactgcagttcatgtattttgcatagactt

SEQ ID NO: 69176 - DNA, 50 bp, synthetic construct
  source 1..50: mol_type = other DNA
tattgtgggtacatgatattagggaacccaaacgtagtcaacccccaata

SEQ ID NO: 69177 - DNA, 50 bp, synthetic construct
  source 1..50: mol_type = other DNA
caggtagtgcattaagatagcatataatacctccctaaatacaccacttg

SEQ ID NO: 69178 - DNA, 50 bp, synthetic construct
  source 1..50: mol_type = other DNA
aaaattttagttattggggtttacaatgtccccacaaagacgagcactga

SEQ ID NO: 69179 - DNA, 50 bp, synthetic construct
  source 1..50: mol_type = other DNA
ctctcatgttattcctcctatggatattgccgcacggtatgccgcagatc

SEQ ID NO: 69180 - DNA, 50 bp, synthetic construct
  source 1..50: mol_type = other DNA
tataatgagttattgagtttgaaatgttgtaaacaaaatcgcctattaat

SEQ ID NO: 69181 - DNA, 50 bp, synthetic construct
  source 1..50: mol_type = other DNA
cgcaccgccgaccagctcacccggcgctggggaaggatgccggcgagaaa

SEQ ID NO: 69182 - DNA, 50 bp, synthetic construct
  source 1..50: mol_type = other DNA
ggcaagacgatgtcgcccgaagccgacggttcggagccgatcgcgctacc

SEQ ID NO: 69183 - DNA, 50 bp, synthetic construct
  source 1..50: mol_type = other DNA
gaatgaaggaattgtttctactcaattgataatcaacaagttgtatattt

SEQ ID NO: 69184 - DNA, 50 bp, synthetic construct
  source 1..50: mol_type = other DNA
atggacttcgacctgcaccggccgcgcgtctgttctaggtcgttggccag

SEQ ID NO: 69185 - DNA, 50 bp, synthetic construct
  source 1..50: mol_type = other DNA
gctctgcggcggcccctcacccatgagcgcgtgagcggccgttcccgcct

SEQ ID NO: 69186 - DNA, 50 bp, synthetic construct
  source 1..50: mol_type = other DNA
aaataagaggtgcatttagaccttgacacgtttaaatacaccacctaaag

SEQ ID NO: 69187 - DNA, 50 bp, synthetic construct
  source 1..50: mol_type = other DNA
tagtgcatttagaccttgatgattttagacacgtttaaatacaccaccta

SEQ ID NO: 69188 - DNA, 50 bp, synthetic construct
  source 1..50: mol_type = other DNA
caggtagtgcattaagatagcctataataccttcctaaatacactacctg

SEQ ID NO: 69189 - DNA, 50 bp, synthetic construct
  source 1..50: mol_type = other DNA
cgacatcaagtttggacaaaagtgctcatcattgtccaaacctatgttga

SEQ ID NO: 69190 - DNA, 50 bp, synthetic construct
  source 1..50: mol_type = other DNA
atggtgtatttaaacgtgtctaataaatcatcaaggtctaaatacactat

SEQ ID NO: 69191 - DNA, 50 bp, synthetic construct
  source 1..50: mol_type = other DNA
catatgagtgttaaggcaagaatacttttacatagctaaacacgtacctg

SEQ ID NO: 69192 - DNA, 50 bp, synthetic construct
  source 1..50: mol_type = other DNA
gctattgtactaagttgatccttcataaagagtaaacacgataaaagtta

SEQ ID NO: 69193 - DNA, 50 bp, synthetic construct
  source 1..50: mol_type = other DNA
ttgtatcgctttaggtggtgtatttaaatacacctcccatttcagatggt

SEQ ID NO: 69194 - DNA, 50 bp, synthetic construct
  source 1..50: mol_type = other DNA
ttgtatcgctttaggtagtgtatttaaatacactatgaggttgattaggg

SEQ ID NO: 69195 - DNA, 50 bp, synthetic construct
  source 1..50: mol_type = other DNA
tctcgtgtgttgatgggtacatgatagtcaacccccagtaacacccgatt

SEQ ID NO: 69196 - DNA, 50 bp, synthetic construct
  source 1..50: mol_type = other DNA
tcgtagttattaggggtttactaatatttcggattccctaatatcatgta

SEQ ID NO: 69197 - DNA, 50 bp, synthetic construct
  source 1..50: mol_type = other DNA
aatcagttaaaaagtggttcgagaaatcgaaattcatctcggtttgtcca

SEQ ID NO: 69198 - DNA, 50 bp, synthetic construct
  source 1..50: mol_type = other DNA
acttttttaaaaaatagatatttttaaaattctttatatcttccatttga

SEQ ID NO: 69199 - DNA, 50 bp, synthetic construct
  source 1..50: mol_type = other DNA
ttaaatggaaaatataaagaattttaaaaatatctattttttaaaaaagt
